(19) United States
(12) Patent Application Publication
(10) Pub. No.: US 2025/0304989 A1
(43) Pub. Date: Oct. 2, 2025

(54) METHODS OF INCREASING PLANT PRODUCTIVITY AND TOLERANCE TO WATER & NUTRIENT DEFICIENCY

(71) Applicant: Performance Plants Inc., Kingston (CA)

(72) Inventors: Jiangxin WAN, Bath (CA); Shujun YANG, Kingston (CA); Kate JOSLIN, Verona (CA); Xurong TANG, Kingston (CA); Gang TIAN, Kingston (CA); Yafan HUANG, Bath (CA)

(21) Appl. No.: 18/579,239

(22) PCT Filed: Jul. 13, 2022
(86) PCT No.: PCT/CA2022/051091

§ 371 Date: Jan. 12, 2024

Related U.S. Application Data
(60) Provisional application No. 63/222,193, filed on Jul. 15, 2021.

(51) Int. Cl. C12N 15/82; C12N 9/22; C12N 15/11

(52) U.S. Cl. CPC C12N 15/8273; C12N 9/226; C12N 15/11; C12N 15/8213; C12N 15/8271; C12N 2310/20

(57) ABSTRACT

The present invention provides methods of increasing plant productivity and tolerance to water and nutrient deficiency by overexpressing an exonuclease responsible for the d200 mutant. Also provided are plants which overexpress the exonuclease and have improved tolerance to water and nutrient deficiency.

### CROSS REFERENCE TO RELATED APPLICATIONS

[0001] This application is a U.S. National Phase application, filed under 35 U.S.C. § 371(c), of International Application No. PCT/CA2022/051091, filed Jul. 13, 2022, which claims benefit of U.S. Provisional Application No. 63/222,193, filed Jul. 15, 2021, the contents of each of which are hereby incorporated by reference in their entirety.

### REFERENCE TO AN ELECTRONIC SEQUENCE LISTING

[0002] The contents of the electronic sequence listing (PREP-020_N01US_SeqListing_st26.xml; Size: 896,437 bytes; and Date of Creation: Dec. 18, 2024) are herein incorporated by reference in its entirety.

### FIELD OF INVENTION

[0003] The present invention relates to methods of increasing tolerance to water and nutrient stresses and improvement of plant water use efficiency, and methods of increasing yield including root, shoot and seed production of a plant, plant part or plant cell under various environmental conditions.

### BACKGROUND OF THE INVENTION

[0004] Plants are often subject to various environmental stresses such as drought, high temperature, cold and excess salt throughout their development (Zhu 2016). Drought as a major environmental factor may adversely affect various aspects of plant development including seed germination, vegetative growth, fertility and seed filling, thus limiting plant productivity in agriculture. Plants respond to drought via complex regulatory networks starting from water deficit sensing to various molecular, cellular, and physiological responses (Yang et al, 2010; Takahashi et al., 2018).

[0005] As some examples, drought tolerance could be improved by modulating stomatal density (Yoo et al., 2010) or stomatal transpiration regulated by phytohormone abscisic acid (ABA, Mega et al., 2019; Yang et al., 2019). Drought tolerance could also be improved by stabilizing active conformation of cellular proteins or RNA molecules under stressed conditions. For instance, ectopic expression of bacterial RNA chaperones in corn confers plant drought tolerance and higher grain yield under water-limited field conditions (Castiglioni et al., 2008). Plant transcription complex such as nuclear factor Y (NF-Y) and Hardy (HRD) could act as regulators for various physiological responses. Over-expression of NF-Y or HRD in corn or wheat makes the transgenic crops more tolerant to drought under water-limited field conditions respectively (Nelson et al., 2007; Karaba et al., 2007).

[0006] The discovery of these regulators of plant response to water deficiency facilitate the development of biotechnologies for enhancing drought tolerance in crop plants. However, the successful application of the technologies in the field is still scarce. As current agricultural crops bred for yield have generally less resources or morphological capacity to withstand long periods of intense water deficit, it is critical that these crops are able to adapt to water shortage by improving root growth to reach more water resources.

[0007] This background information is provided for the purpose of making known information believed by the applicant to be of possible relevance to the present invention. No admission is necessarily intended, nor should be construed, that any of the preceding information constitutes prior art against the present invention.

### SUMMARY OF THE INVENTION

[0008] An object of the present invention is to provide methods of increasing plant productivity and tolerance to water and nutrient deficiency. In accordance with an aspect of the present invention, there is provided a method of increasing tolerance to water and/or nutrient deficiency in a plant, comprising: modifying expression or activity of AtExo970, homolog or ortholog thereof.

[0009] In certain embodiments, the method comprises a) introducing a nucleic acid construct to a plant, a plant tissue culture or a plant cell to obtain a modified plant, a modified plant tissue culture or a modified plant cell, wherein the nucleic acid construct encodes the AtExo970, homolog or ortholog thereof; b) growing the modified plant or regenerating a plant from the modified plant tissue culture or the modified plant cell; and c) selecting a plant having increased tolerance to water and/or nutrient deficiency relative to a wild type plant. In certain embodiments, the method comprises a) introducing one or more nucleic acid constructs for CRISPR mediated replacement of the native promoter of the gene for AtExo970, homolog or ortholog to a plant, a plant tissue culture or a plant cell to obtain a modified plant, a modified plant tissue culture or a modified plant cell; b) growing the modified plant or regenerating a plant from the modified plant tissue culture or the modified plant cell; and c) selecting a plant having increased tolerance to water and/or nutrient deficiency relative to a wild type plant.

[0010] In accordance with another aspect of the present invention, there is provided a method of increasing plant productivity, comprising: modifying expression or activity of AtExo970, homolog or ortholog thereof.

[0011] In certain embodiments, the method comprises a) introducing a nucleic acid construct to a plant, a plant tissue culture or a plant cell to obtain a modified plant, a modified plant tissue culture or a modified plant cell, wherein the nucleic acid construct encodes the AtExo970, homolog or ortholog thereof; b) growing the modified plant or regenerating a plant from the modified plant tissue culture or the modified plant cell; and c) selecting a plant having increased plant productivity relative to a wild type plant.

[0012] In certain embodiments, the method comprises a) introducing one or more nucleic acid constructs for CRISPR mediated replacement of the native promoter of the gene for AtExo970, homolog or ortholog to a plant, a plant tissue culture or a plant cell to obtain a modified plant, a modified plant tissue culture or a modified plant cell; b) growing the modified plant or regenerating a plant from the modified plant tissue culture or the modified plant cell; and c) selecting a plant having increased tolerance to water and/or nutrient deficiency relative to a wild type plant.

### DETAILED DESCRIPTION OF THE INVENTION

[0013] This invention starts from the identification and characterization of an Arabidopsis mutant d200 from an Activation-tag population (Weigel et al, 2000). d200 showed reduced water loss through transpiration, reduced flower abortion, improved pollen viability under limited water conditions, and increased root and shoot growth under optimal as well as water and nutrient deficit conditions, ultimately enhanced drought tolerance, water use efficiency and plant productivity compared to the parent plant. Gene AtExo970 (TAIR ID At3g27970) was identified as being responsible for the observed phenotypes in d200 mutant. The endogenous AtExo970 has an extremely low basal expression in leaves, stems and flowers in wildtype Arabidopsis, but is highly up regulated in d200 mutant due to the presence of expression enhancer tag located close to the AtExo970 locus. AtExo970 encodes for RNA exonuclease and may be involved in ribosomal RNA (rRNA) or ribosome biogenesis and processing, that ultimately affect the functionality of genes required for plant drought tolerance. Ectopic over-expression of AtExo970 or its orthologs from either monocots (such as wheat, rice, maize and et al) or dicots species (such as canola, soybean, cotton and et al) under constitutive promoter was able to mimic the phenotypes of d200 mutant in transgenic Arabidopsis, soybean and Brachypodium.

### Nucleic Acids and Polypeptides:

[0014] A genetic screen was used to identify a novel exonuclease, AtExo970, and subsequently its orthologs from various plant species which improve tolerance to water and nutrient deficiency as well as improve plant productivity mainly by increasing root growth especially under stressed conditions.

[0015] Accordingly, the present invention provides nucleic acids encoding AtExo970, homologs, orthologs, variants and fragments thereof. The nucleic acid includes DNA, such as cDNA or genomic DNA, or RNA such as mRNA.

[0016] In certain embodiments, there is provided a nucleic acid comprising the sequence as set forth in any one of the sequences set forth herein encoding AtExo970 homologs, orthologs, variants and fragments thereof. In specific embodiments, the sequence comprises the sequence as set forth in any one of SEQ ID NOs: 122, 123, 126, 127, 128, 129, 131, 132, 134, 135, 137, 138, 140, 141, 143, 144, 146, 147, 149, 150, 152, 153, 155, 156, 158, 159, 161, 162, 164, 165, 167, 168, 170, 171, 173, 174, 175, 177, 178, 180, 181, 182, 184, 185, 187, 188, 190, 191, 192, 194, 195, 196, 198, 200, 201, 203, 205, 206, 208, 209, 212, 213, 215, 216, 218, 219, 221, 222, 224, 225, 227, 228, 230, 231, 233, 234, 236, 237, 239, 240, 242, 243, 245, 246, 248, 249, 251, 252, 254, 255, 257, 258, 260, 261, 263, 264, 266, 267, 269, 270, 272, 273, 275, 276, 278, 279, 281, 282, 284, 285, 287, 288, 290, 291, 293, 294, 296, 297, 299, 300, 302, 303, 305, 306, 308, 309, 311, 312, 314, 315, 317, 318, 320, 321, 323, 324, 326, 327, 329, 330, 332, 333, 335, 336, 338, 339, 341, 342, 343, 344, 345, 347, 348, 350, 351, 353, 354, 356, 357, 359, 360, 362, 363, 365, 366, 368, 370, 371, 373, 374, 376, 377, 379, 380, 382, 383, 385, 386, 388, 389, 391, 392, 394, 395, 397, 398, 400, 401, 403, 404, 406, 407, 409 and 410.

[0017] In certain embodiments, there is provided a nucleic acid or encoding the sequence of any one of SEQ ID NOs: 124, 125, 130, 133, 136, 139, 142, 145, 148, 151, 154, 157, 160, 163, 166, 169, 172, 176, 179, 183, 186, 189, 193, 197, 199, 202, 204, 207, 211, 214, 217, 220, 223, 226, 229, 232, 235, 238, 241, 244, 247, 250, 253, 256, 259, 262, 265, 268, 269, 270, 271, 272, 273, 274, 275, 276, 277, 278, 279, 280, 283, 286, 289, 292, 295, 298, 301, 304, 307, 310, 313, 316, 319, 322,325, 328, 331, 334, 337, 340, 343, 346, 349, 352, 355, 358, 361, 364, 367, 369, 372, 375, 378, 381, 384, 387, 390, 393, 396, 399, 402, 405 and 408.

[0018] In some embodiments of the present invention, there is provided a nucleic acid comprising any one of the sequences set forth above comprising one or more substitutions, insertions and/or deletions. Such nucleotide sequences may or may not encode a protein having the same biological activity as the protein comprising reference sequence. Expression of nucleic acids encoding a protein that is not fully functional can be useful in a dominant/negative inhibition method.

[0019] In other embodiments, there is provided a nucleic acid comprising a sequence having at least 50%, 55%, 60%, 65%, 70%, 75%, 80%, 85%, 90%, 95%, 96%, 97%, 98%, 99% or 100% identity to any one of the sequences set forth in SEQ ID NOs: 122, 123, 126, 127, 128, 129, 131, 132, 134, 135, 137, 138, 140, 141, 143, 144, 146, 147, 149, 150, 152, 153, 155, 156, 158, 159, 161, 162, 164, 165, 167, 168, 170, 171, 173, 174, 175, 177, 178, 180, 181, 182, 184, 185, 187, 188, 190, 191, 192, 194, 195, 196, 198, 200, 201, 203, 205, 206, 208, 209, 212, 213, 215, 216, 218, 219, 221, 222, 224, 225, 227, 228, 230, 231, 233, 234, 236, 237, 239, 240, 242, 243, 245, 246, 248, 249, 251, 252, 254, 255, 257, 258, 260, 261, 263, 264, 266, 267, 269, 270, 272, 273, 275, 276, 278, 279, 281, 282, 284, 285, 287, 288, 290, 291, 293, 294, 296, 297, 299, 300, 302, 303, 305, 306, 308, 309, 311, 312, 314, 315, 317, 318, 320, 321, 323, 324, 326, 327, 329, 330, 332, 333, 335, 336, 338, 339, 341, 342, 343, 344, 345, 347, 348, 350, 351, 353, 354, 356, 357, 359, 360, 362, 363, 365, 366, 368, 370, 371, 373, 374, 376, 377, 379, 380, 382, 383, 385, 386, 388, 389, 391, 392, 394, 395, 397, 398, 400, 401, 403, 404, 406, 407, 409 and 410, and fragments thereof. In certain embodiments, fragments are at least 10, at least 20, at least 50 nucleotides in length. The fragments may be used, for example, as primers or probes.

[0020] In other embodiments, there is provided a nucleic acid encoding a polypeptide comprising a sequence at least 50%, 55%, 60%, 65%, 70%, 75%, 80%, 85%, 90%, 95%, 96%, 97%, 98%, 99% (or more) percent identity to any one of the sequences set forth in SEQ ID NOs: 124, 125, 130, 133, 136, 139, 142, 145, 148, 151, 154, 157, 160, 163, 166, 169, 172, 176, 179, 183, 186, 189, 193, 197, 199, 202, 204, 207, 211, 214, 217, 220, 223, 226, 229, 232, 235, 238, 241, 244, 247, 250, 253, 256, 259, 262, 265, 268, 269, 270, 271, 272, 273, 274, 275, 276, 277, 278, 279, 280, 283, 286, 289, 292, 295, 298, 301, 304, 307, 310, 313, 316, 319, 322,325, 328, 331, 334, 337, 340, 343, 346, 349, 352, 355, 358, 361, 364, 367, 369, 372, 375, 378, 381, 384, 387, 390, 393, 396, 399, 402, 405 and 408 and fragments thereof.

[0021] In certain embodiments, there are provided nucleic acids further comprise or encode heterologous sequences. The heterologous sequences may include but are not limited to markers, including fluorescent markers such as GFP, herbicide and/or pest resistance proteins such as EPSPS. In certain embodiments, the present invention provides nucleic acids encoding the polypeptide of the invention with herbicide and/or pest resistance proteins. In specific embodiments, the present invention provides nucleic acids comprising any of the sequences set forth above together with sequences encoding EPSPS, GPR or GFR. In specific embodiments, the present invention provides nucleic acids comprising any one of the sequences set forth above together with sequences encoding Cry1Ac, Cry1Ca and Cry3Aa. In certain embodiments, the present invention provides nucleic acids encoding fusion proteins comprising the polypeptide of the present invention and a heterologous polypeptide. In certain embodiments, the fusion polypeptide comprises a linker sequence between the polypeptides.

[0022] Also provided are nucleic acids that hybridize to the nucleic acids of the present invention. In certain embodiments, there is provided a nucleic acid that hybridizes to any one of the sequences as set forth in SEQ ID NOs: 122, 123, 126, 127, 128, 129, 131, 132, 134, 135, 137, 138, 140, 141, 143, 144, 146, 147, 149, 150, 152, 153, 155, 156, 158, 159, 161, 162, 164, 165, 167, 168, 170, 171, 173, 174, 175, 177, 178, 180, 181, 182, 184, 185, 187, 188, 190, 191, 192, 194, 195, 196, 198, 200, 201, 203, 205, 206, 208, 209, 212, 213, 215, 216, 218, 219, 221, 222, 224, 225, 227, 228, 230, 231, 233, 234, 236, 237, 239, 240, 242, 243, 245, 246, 248, 249, 251, 252, 254, 255, 257, 258, 260, 261, 263, 264, 266, 267, 269, 270, 272, 273, 275, 276, 278, 279, 281, 282, 284, 285, 287, 288, 290, 291, 293, 294, 296, 297, 299, 300, 302, 303, 305, 306, 308, 309, 311, 312, 314, 315, 317, 318, 320, 321, 323, 324, 326, 327, 329, 330, 332, 333, 335, 336, 338, 339, 341, 342, 343, 344, 345, 347, 348, 350, 351, 353, 354, 356, 357, 359, 360, 362, 363, 365, 366, 368, 370, 371, 373, 374, 376, 377, 379, 380, 382, 383, 385, 386, 388, 389, 391, 392, 394, 395, 397, 398, 400, 401, 403, 404, 406, 407, 409 and 410 under conditions of low, moderate or high stringency. A worker skilled in the art readily appreciates that hybridization and the strength of hybridization (i.e., the strength of the association between the nucleic acids) is impacted by such factors as the degree of complementary between the nucleic acids, stringency of the conditions involved, the Tm of the formed hybrid, and the G:C ratio within the nucleic acids. Such a worker could readily determine appropriate stringent (see, for example, Sambrook, et al., Molecular Cloning: A Laboratory Manual, 2nd ed., Cold Spring Harbor Laboratory Press, New York (1989) pp. 9.50-51, 11.48-49 and 11.2-11.3).

[0023] Typically under high stringency conditions only highly similar sequences will hybridize (typically >95% identity). Under moderate stringency conditions typically those sequence having greater than 80% identity will hybridize and under low stringency conditions those sequences having greater than 50% identity will hybridize.

[0024] A non-limiting example of “high stringency conditions” when used in reference to nucleic acid hybridization comprise conditions equivalent to binding or hybridization at 42° C. in a solution consisting of 5×SSPE (43.8 g/I NaCl, 6.9 g/I NaH2PO4H2O and 1.85 g/I EDTA, pH adjusted to 7.4 with NaOH), 0.5% SDS, 5×Denhardt's reagent and 100 μg/ml denatured salmon sperm DNA followed by washing in a solution comprising 0.1×SSPE, 1.0% SDS at 42° C. when a probe of about 500 nucleotides in length is employed. A non-limiting example of “medium stringency conditions” when used in reference to nucleic acid hybridization comprise conditions equivalent to binding or hybridization at 42° C. in a solution consisting of 5×SSPE (43.8 g/I NaCl, 6.9 g/I NaH2PO4H2O and 1.85 g/I EDTA, pH adjusted to 7.4 with NaOH), 0.5% SDS, 5×Denhardt's reagent and 100 μg/ml denatured salmon sperm DNA followed by washing in a solution comprising 1.0XSSPE, 1.0% SDS at 42° C. when a probe of about 500 nucleotides in length is employed. A non-limiting example “Low stringency conditions” when used in reference to nucleic acid hybridization comprise conditions equivalent to binding or hybridization at 42° C. in a solution consisting of 5×SSPE (43.8 g/I NaCl, 6.9 g/I NaH2PO4H2O and 1.85 g/I EDTA, pH adjusted to 7.4 with NaOH), 0.5% SDS, 5×Denhardt's reagent and 100 μg/ml denatured salmon sperm DNA followed by washing in a solution comprising 5×SSPE, 0.1% SDS at 42° C. when a probe of about 500 nucleotides in length is employed.

[0025] Also provided are nucleic acids that are complementary to the nucleic acids of the present invention. In certain embodiments, there is provided a nucleic acid that hybridizes to any one of the sequences as set forth in SEQ ID NOs: SEQ ID NOs: 122, 123, 126, 127, 128, 129, 131, 132, 134, 135, 137, 138, 140, 141, 143, 144, 146, 147, 149, 150, 152, 153, 155, 156, 158, 159, 161, 162, 164, 165, 167, 168, 170, 171, 173, 174, 175, 177, 178, 180, 181, 182, 184, 185, 187, 188, 190, 191, 192, 194, 195, 196, 198, 200, 201, 203, 205, 206, 208, 209, 212, 213, 215, 216, 218, 219, 221, 222, 224, 225, 227, 228, 230, 231, 233, 234, 236, 237, 239, 240, 242, 243, 245, 246, 248, 249, 251, 252, 254, 255, 257, 258, 260, 261, 263, 264, 266, 267, 269, 270, 272, 273, 275, 276, 278, 279, 281, 282, 284, 285, 287, 288, 290, 291, 293, 294, 296, 297, 299, 300, 302, 303, 305, 306, 308, 309, 311, 312, 314, 315, 317, 318, 320, 321, 323, 324, 326, 327, 329, 330, 332, 333, 335, 336, 338, 339, 341, 342, 343, 344, 345, 347, 348, 350, 351, 353, 354, 356, 357, 359, 360, 362, 363, 365, 366, 368, 370, 371, 373, 374, 376, 377, 379, 380, 382, 383, 385, 386, 388, 389, 391, 392, 394, 395, 397, 398, 400, 401, 403, 404, 406, 407, 409, and 410 or fragment thereof.

[0026] A worker skilled in the art would readily appreciate that CRISPR methodologies may be used for targeted DNA alteration in plant cells. In such methodologies a CRISPR-Cas system guide RNA that hybridizes with the target sequence is utilized. Accordingly, the present invention also provides nucleic acids that hybridizes to target sequences to modify endogenous expression of exonuclease of the present invention. Exemplary guide nucleic acids for use in CRISPR methodologies include but are not limited to SEQ ID NOs: 68, 69, 70, 71 and 72.

[0027] In specific embodiments, CRISPR is utilized to replace the native promoter of the exonuclease gene of the present invention. In such embodiments, there is provided a HDR template containing the new promoter. The promoter may be a constitutive promoter, an inducible promoter, or tissue specific promoter. Non-limiting examples of promoters are set forth in SEQ ID NOs: 414, 415, 426, 427, 452, 453, 454, 455, 456, 457, 458, 459, 460 and 461.

[0028] The present invention also provides AtExo970, homologs, orthologs, variants and fragments thereof.

[0029] In certain embodiments, there is provided a polypeptide comprising a sequence encoded by the sequence as set forth in any one of SEQ ID NOs: 122, 123, 126, 127, 128, 129, 131, 132, 134, 135, 137, 138, 140, 141, 143, 144, 146, 147, 149, 150, 152, 153, 155, 156, 158, 159, 161, 162, 164, 165, 167, 168, 170, 171, 173, 174, 175, 177, 178, 180, 181, 182, 184, 185, 187, 188, 190, 191, 192, 194, 195, 196, 198, 200, 201, 203, 205, 206, 208, 209, 212, 213, 215, 216, 218, 219, 221, 222, 224, 225, 227, 228, 230, 231, 233, 234, 236, 237, 239, 240, 242, 243, 245, 246, 248, 249, 251, 252, 254, 255, 257, 258, 260, 261, 263, 264, 266, 267, 269, 270, 272, 273, 275, 276, 278, 279, 281, 282, 284, 285, 287, 288, 290, 291, 293, 294, 296, 297, 299, 300, 302, 303, 305, 306, 308, 309, 311, 312, 314, 315, 317, 318, 320, 321, 323, 324, 326, 327, 329, 330, 332, 333, 335, 336, 338, 339, 341, 342, 343, 344, 345, 347, 348, 350, 351, 353, 354, 356, 357, 359, 360, 362, 363, 365, 366, 368, 370, 371, 373, 374, 376, 377, 379, 380, 382, 383, 385, 386, 388, 389, 391, 392, 394, 395, 397, 398, 400, 401, 403, 404, 406, 407, 409, and 410 or fragment thereof.

[0030] In certain embodiments, there is provided a polypeptide comprising the sequence of any one of SEQ ID NOs: 124, 125, 130, 133, 136, 139, 142, 145, 148, 151, 154, 157, 160, 163, 166, 169, 172, 176, 179, 183, 186, 189, 193, 197, 199, 202, 204, 207, 211, 214, 217, 220, 223, 226, 229, 232, 235, 238, 241, 244, 247, 250, 253, 256, 259, 262, 265, 268, 269, 270, 271, 272, 273, 274, 275, 276, 277, 278, 279, 280, 283, 286, 289, 292, 295, 298, 301, 304, 307, 310, 313, 316, 319, 322,325, 328, 331, 334, 337, 340, 343, 346, 349, 352, 355, 358, 361, 364, 367, 369, 372, 375, 378, 381, 384, 387, 390, 393, 396, 399, 402, 405, 408 or fragment thereof.

[0031] In some embodiments of the present invention, there is provided a polypeptide comprising the any one of the sequences set forth above comprising one or more substitutions, insertions and/or deletions. In specific embodiments, such proteins have the same biological activity as a polypeptide comprising reference sequence.

[0032] In other embodiments, there is provided a polypeptide comprising a sequence at least 50%, 55%, 60%, 65%, 70%, 75%, 80%, 85%, 90%, 95%, 96%, 97%, 98%, 99% (or more) percent identity to any one of the sequences set forth in SEQ ID NOs: 124, 125, 130, 133, 136, 139, 142, 145, 148, 151, 154, 157, 160, 163, 166, 169, 172, 176, 179, 183, 186, 189, 193, 197, 199, 202, 204, 207, 211, 214, 217, 220, 223, 226, 229, 232, 235, 238, 241, 244, 247, 250, 253, 256, 259, 262, 265, 268, 269, 270, 271, 272, 273, 274, 275, 276, 277, 278, 279, 280, 283, 286, 289, 292, 295, 298, 301, 304, 307, 310, 313, 316, 319, 322,325, 328, 331, 334, 337, 340, 343, 346, 349, 352, 355, 358, 361, 364, 367, 369, 372, 375, 378, 381, 384, 387, 390, 393, 396, 399, 402, 405, 408 and fragments thereof. In specific embodiments, such proteins have the same biological activity as the protein comprising reference sequence.

[0033] In certain embodiments, the present invention provides fusion proteins comprising the polypeptide of the present invention and a heterologous polypeptide. The heterologous sequences may include but are not limited to markers, including fluorescent markers such as GFP, herbicide and/or pest resistance proteins, such as Cry1Ac, Cry1Ca, Cry3Aa, EPSPS, GPR or GFR. In certain embodiments, the fusion polypeptide comprises a linker sequence between the polypeptides.

### Vectors

[0034] The present invention further provides vectors. In certain embodiments, there is provided expression vectors comprising the nucleic acids or expressing the polypeptides of the present invention. In certain embodiments, the expression vectors further comprise heterologous sequences. Such heterologous sequences may include but are not limited to sequences encoding fluorescent markers such as GFP, herbicide and/or pest resistance proteins. The heterologous sequences may be part of a fusion protein with the polypeptides of the present invention or expressed as a separate protein.

[0035] In certain embodiments, the present invention further provides vectors for CRISPR mediated DNA alteration. In such embodiments, one or more vectors express Cas9 and guide RNA. In certain embodiments where CRISPR is utilized to replace the promoter, the one or more vectors further provide the homology-directed repair (HDR) template containing the new promoter flanked by 100-500 bp of DNA sequences from the plant genome flanking the Cas9 cutting site on each side.

[0036] The recombinant expression vectors of the invention comprise a nucleic acid of the invention in a form suitable for expression in a host cell, which means that the recombinant expression vectors include one or more regulatory sequences, selected on the basis of the host cells to be used for expression, that is operatively-linked to the nucleic acid sequence to be expressed. Within a recombinant expression vector, “operably-linked” is intended to mean that the nucleotide sequence of interest is linked to the regulatory sequence(s) in a manner that allows for expression of the nucleotide sequence (e.g., in an in vitro transcription/translation system or in a host cell when the vector is introduced into the host cell).

[0037] The term “regulatory sequence” is intended to include promoters, enhancers and other expression control elements (e.g., polyadenylation signals). Such regulatory sequences are described, for example, in Goeddel (1990). Regulatory sequences include those that direct constitutive expression of a nucleotide sequence in many types of host cell and those that direct expression of the nucleotide sequence only in certain host cells (e.g., tissue-specific regulatory sequences) or inducible promoters (e.g., induced in response to abiotic factors such as environmental conditions, heat, drought, nutrient status or physiological status of the cell or biotic such as pathogen responsive). Examples of suitable promoters include constitutive promoters and conditional promoters such as inducible promoters and tissue specific promoters. A worker skilled in the art would readily appreciate that conditional promoters such as drought inducible and tissue specific may be used to optimize the beneficial effect and to mitigate the undesirable side-effects.

[0038] In certain embodiments, the promoter comprises the sequence as set forth in SEQ ID NOs: 414, 415, 426, 427, 452, 453, 454, 455, 456, 457, 458, 459, 460 or 461. It will be appreciated by those skilled in the art that the design of the expression vector can depend on such factors as the choice of the host cell to be transformed, the level of expression of protein desired as well as timing and location of expression, etc. The expression vectors of the invention can be introduced into host cells to thereby produce proteins or peptides, including fusion proteins or peptides, encoded by nucleic acids as described herein.

[0039] The recombinant expression vectors of the invention can be designed for expression in prokaryotic or eukaryotic cells. Exemplary cells include but are not limited to bacterial cells such as Escherichia coli, insect cells (using baculovirus expression vectors), yeast cells, plant cells or mammalian cells. Suitable host cells are discussed further in Goeddel (1990). Alternatively, the recombinant expression vector can be transcribed and translated in vitro, for example using T7 promoter regulatory sequences and T7 polymerase.

[0040] In one embodiment, the nucleic acids of the present invention are expressed in plants cells using plant expression vectors. Examples of plant expression vectors systems include but are not limited to tumor inducing (Ti) plasmid or portion thereof found in Agrobacterium, cauliflower mosaic virus (CaMV) DNA and vectors such as pB1121.

[0041] For expression in plants, the recombinant expression cassette may contain in addition to the nucleic acid of interest, a promoter region that functions in a plant cell, a transcription initiation site (if the coding sequence to be transcribed lacks one), and optionally a transcription termination/polyadenylation sequence. The termination/polyadenylation region may be obtained from the same gene as the promoter sequence or may be obtained from different genes. Unique restriction enzyme sites at the 5′ and 3′ ends of the cassette are typically included to allow for easy insertion into a pre-existing vector.

[0042] Examples of suitable promoters include promoters from plant viruses such as the 35S promoter from cauliflower mosaic virus (CaMV) (Odell et al., 1985), promoters from genes such as rice actin (McElroy et al., 1990), ubiquitin (Christensen et al., 1992; pEMU (Last et al., 1991), MAS (Velten et al., 1984), maize H3 histone (Lepetit et al., 1992); and Atanassvoa et al., 1992), the 5′- or 3′-promoter derived from T-DNA of Agrobacterium tumefaciens, the Smas promoter, the cinnamyl alcohol dehydrogenase promoter (U.S. Pat. No. 5,683,439), the Nos promoter, the rubisco promoter, the GRP1-8 promoter, ALS promoter, (WO 96/30530), a synthetic promoter, such as Rsyn7, SCP and UCP promoters, ribulose-1,3-diphosphate carboxylase, fruit-specific promoters, heat shock promoters, seed-specific promoters and other transcription initiation regions from various plant genes, for example, including the various opine initiation regions, such as for example, octopine, mannopine, and nopaline.

[0043] Additional regulatory elements that may be connected to a nucleic acid of the invention for expression in plant cells include terminators, polyadenylation sequences, and nucleic acid sequences encoding signal peptides that permit localization within a plant cell or secretion of the protein from the cell. Such regulatory elements and methods for adding or exchanging these elements with other regulatory elements are known and include, but are not limited to, 3′ termination and/or polyadenylation regions such as those of the Agrobacterium tumefaciens nopaline synthase (nos) gene (Bevan et al., 1983); the potato proteinase inhibitor II (PINII) gene (Keil et al., 1986) and hereby incorporated by reference); and An et al. (1989); and the CaMV 19S gene (Mogen et al., 1990).

[0044] Plant signal sequences, including, but not limited to, signal-peptide encoding DNA/RNA sequences which target proteins to the extracellular matrix of the plant cell (Dratewka-Kos et al., 1989) and the Nicotiana plumbaginifolia extension gene (De Loose et al., 1991), or signal peptides which target proteins to the vacuole like the sweet potato sporamin gene (Matsuoka et al., 1991) and the barley lectin gene (Wilkins et al., 1990), or signals which cause proteins to be secreted such as that of PRIb (Lund et al., 1992), or those which target proteins to the plastids such as that of rapeseed enoyl-ACP reductase (Verwoert et al., 1994) are useful in the invention.

[0045] In another embodiment, the recombinant expression vector is capable of directing expression of the nucleic acid preferentially in a particular cell type (e.g., tissue-specific regulatory elements are used to express the nucleic acid). Tissue-specific regulatory elements are known in the art.

[0046] For example, the promoter associated with a coding sequence identified in the TAIR data base as At2g44790 (P.sub.4790) is a root specific promoter.

[0047] Organ-specific promoters are also well known. For example, the chalcone synthase-A gene (van der Meer et al., 1990) or the dihydroflavonol-4-reductase (dfr) promoter (Elomaa et al., 1998) direct expression in specific floral tissues. Also available are the patatin class I promoter is transcriptionally activated only in the potato tuber and can be used to target gene expression in the tuber (Bevan, 1986). Another potato-specific promoter is the granule-bound starch synthase (GBSS) promoter (Visser et al., 1991).

[0048] Other organ-specific promoters appropriate for a desired target organ can be isolated using known procedures. These control sequences are generally associated with genes uniquely expressed in the desired organ. In a typical higher plant, each organ has thousands of mRNAs that are absent from other organ systems (reviewed in Goldberg, 1986).

[0049] In certain embodiments, the promoter is selected from the group consisting of pVaEF670, pVrEF027, pPsEF774 and pPsEF893.

[0050] In certain embodiments, the promoter comprises the sequence as set forth in any one of SEQ ID NOs: 414, 415, 426, 427, 452, 453, 454, 455, 456, 457, 458, 459, 460 and 461.

[0051] The resulting expression system or cassette is ligated into or otherwise constructed to be included in a recombinant vector which is appropriate for plant transformation. The vector may also contain a selectable marker gene by which transformed plant cells can be identified in culture. The marker gene may encode antibiotic resistance proteins. These markers include resistance to G418, hygromycin, bleomycin, kanamycin, and gentamicin. Alternatively, the marker gene may encode a herbicide tolerance protein that provides tolerance to glufosinate or glyphosate type herbicides. After transforming the plant cells, those cells having the vector will be identified by their ability to grow on a medium containing the particular antibiotic or herbicide. Replication sequences, of bacterial or viral origin, are generally also included to allow the vector to be cloned in a bacterial or phage host, preferably a broad host range prokaryotic origin of replication is included. A selectable marker for bacteria may also be included to allow selection of bacterial cells bearing the desired construct. Suitable prokaryotic selectable markers also include resistance to antibiotics such as kanamycin or tetracycline.

[0052] Other DNA sequences encoding additional functions may also be present in the vector, as is known in the art. For instance, in the case of Agrobacterium transformations, T-DNA sequences will also be included for subsequent transfer to plant chromosomes.

[0053] Another aspect of the invention pertains to host cells into which a recombinant expression vector of the invention has been introduced. The terms “host cell” and “recombinant host cell” are used interchangeably herein. It is understood that such terms refer not only to the particular subject cell but also to the progeny or potential progeny of such a cell. Because certain modifications may occur in succeeding generations due to either mutation or environmental influences, such progeny may not, in fact, be identical to the parent cell, but are still included within the scope of the term as used herein.

[0054] Vector DNA can be introduced into prokaryotic or eukaryotic cells via conventional transformation or transfection techniques. As used herein, the terms “transformation” and “transfection” are intended to refer to a variety of art-recognized techniques for introducing foreign nucleic acid (e.g., DNA) into a host cell.

### Cells and Plants:

[0055] Also provided are cells and plants having modified expression or activity of the polypeptides of the present invention. The cells may be in culture, in a plant tissue including for example, leaves, stems, shoots, roots, flowers, fruits and seeds or whole plant. Exemplary plant cells include but are not limited to epidermal cells, mesophyll and other ground tissues, and vascular tissues in leaves, stems, floral organs, and roots. Plants include plants at any stage of development. The cells and plants may be non-mutagenized, mutagenized or transgenic and the progeny thereof.

[0056] The plant can be any monocot or dicot. In certain embodiments, the plant is a commercial crop, produce crop, a biofuel crop, an ornamental plant, a flowering plant, an annual plant or a perennial plant. Examples of plants include but are not limited Arabidopsis thaliana, Brassica napus, Glycine max, Zea mays, Triticum aestivum, Brachypodium distachyon, Oryza sativa, Brassica oleracea, Brassica rapa, Gossypium hirsutum, Gossypium raimondii, Hordeum vulgare, Setaria italica, Sorghum bicolor, Miscanthus sinensis, Panicum virgatum, Solanum lycopersicum, Cucumis sativus, Lactuca sativa, Vigna nguiculata, Phaseolus vulgaris, Cicer arietinum, Daucus carota, Asparagus fficinalis, Solanum tuberosum, Carica papaya, Chenopodium quinoa, Malus omestica, Citrus sinensis, Vitis vinifera, Manihot esculenta, Theobroma cacao, Coffea arabica, Camellia sinesis, Olea europaea, Populus trichocarpa, Taraxacum kok-saghyz, Helianthus annuus and Petunia axillaris.

[0057] In certain embodiments, the cells and plants over-express the polypeptides of the present invention as compared to wild type cells and plants. In alternative embodiments, the cells and plants under express the polypeptides of the present invention. A worker skilled in the art would readily appreciate that endogenous expression of the polypeptides of the present invention can be modified.

[0058] In certain embodiments, endogenous expression or activity of the polypeptides of the present invention is modified by mutating the native promoter or gene encoding the polypeptide of the invention. A worker skilled in the art would readily appreciate methods for random or site directed mutations and methods of screening for mutants.

[0059] In certain embodiments, the plant has been modified using site-directed methodologies targeting the promoter and/or gene encoding the polypeptides of the invention. A worker skilled in the art would readily appreciate methods for mutating or genetically modifying the promoter or gene. For example, a worker skilled in the art would readily appreciate the CRISPR editing methodologies may be used. Non-limiting illustrative examples of CRISPR editing methodologies are detailed in the examples. A worker skilled in the art would readily appreciate that other examples of site-directed methods include but are not limited to methods utilizing meganucleases, TALENs and zinc finger nucleases In certain embodiments, the plants have been mutagenesized by chemical or physical means.

[0060] For example, a worker skilled in the art would readily appreciate that ethylmethane sulfonate (EMS) may be used as a mutagen or radiation, such as x-ray, y-ray, and fast-neutron radiation may be used as a mutagen.

[0061] In certain embodiments, endogenous expression of the polypeptides of the present invention is modified by replacing the native promoter with an alternative promoter, such as constitutive promoter, a dehydration-inducible promoter or tissue specific promoter. A worker skilled in the art would readily appreciate the CRISPR editing methodologies may be used to modify endogenous expression. Non-limiting illustrative examples of CRISPR editing methodologies are detailed in the examples.

[0062] In certain embodiments, there is provided cells and plants expressing exogenous polypeptides of the present invention. Non-limiting illustrative examples of methods utilizing vectors which express the polypeptides of the present invention are detailed in the examples.

[0063] In certain embodiments, the plants over expressing the polypeptides of the present invention have improved plant productivity, improved tolerance to water deficiency and/or nutrient deficiency as compared to wild type plants. In certain embodiments, the plants over expressing the polypeptides of the present invention have improved pollen viability under optimal and/or drought conditions as compare to wild type plants. In certain embodiments, the plants over expressing the polypeptides of the present invention have improved plant productivity under optimal and/or water and/or nutrient (including but not limited to nitrogen or phosphorous) deficient conditions as compared to wild type plants. Methods of measuring plant productivity are known in the art and include for example measuring shoot and/or root biomass.

### Methods:

[0064] The present invention further provides methods for producing the polypeptide of the present invention. In certain embodiments, the method comprises culturing a cell capable of expressing the nucleic acid of the invention in a suitable medium such that the polypeptide of the present invention is produced. A worker skilled in the art would readily appreciate that the cell may genetically modified to express or over express the nucleic acids of the present invention. In certain embodiments, the cells are genetically modified such that endogenous expression is modified by replacing the native promoter with an alternative promoter. In alternative embodiments, an expression vector expressing the polypeptide was introduced into the cell.

[0065] The present invention provides methods of improving plant productivity, tolerance to water deficiency and/or nutrient deficiency by over expressing the polypeptide of the present invention by upregulating endogenous expression and/or introducing an expression vector expressing the polypeptide in the plant. In certain embodiments, the expression vector expresses additional polypeptides or the additional expression vectors are introduced which express additional polypeptides, including for example proteins for herbicide resistance and/or pest resistance.

[0066] Also included in the invention are methods of producing a transgenic plant having of improved plant productivity, tolerance to water deficiency and/or nutrient deficiency by over expressing the polypeptide of the present invention by upregulating endogenous expression, for example by CRISPR mediated replacement of the native promoter and/or introducing an expression vector expressing the polypeptide in the plant. In certain embodiments, the plants are further modified to express additional polypeptides. For example, the expression vector may express additional polypeptides or expression vectors which express additional polypeptides are introduced, including for example proteins for herbicide resistance and/or pest resistance.

[0067] The plant can be any monocot or dicot. In certain embodiments, the plant is a commercial crop, produce crop, a biofuel crop, an ornamental plant, a flowering plant, an annual plant or a perennial plant. Examples of plants include but are not limited Arabidopsis thaliana, Brassica napus, Glycine max, Zea mays, Triticum aestivum, Brachypodium distachyon, Oryza sativa, Brassica oleracea, Brassica rapa, Gossypium hirsutum, Gossypium raimondii, Hordeum vulgare, Setaria italica, Sorghum bicolor, Miscanthus sinensis, Panicum virgatum, Solanum lycopersicum, Cucumis sativus, Lactuca sativa, Vigna nguiculata, Phaseolus vulgaris, Cicer arietinum, Daucus carota, Asparagus fficinalis, Solanum tuberosum, Carica papaya, Chenopodium quinoa, Malus omestica, Citrus sinensis, Vitis vinifera, Manihot esculenta, Theobroma cacao, Coffea arabica, Camellia sinesis, Olea europaea, Populus trichocarpa, Taraxacum kok-saghyz, Helianthus annuus and Petunia axillaris.

[0068] Numerous methods for introducing foreign nucleic acids into plants are known and can be used to insert a nucleic acid into a plant host, including biological and physical plant transformation protocols (See, for example, Miki et al., (1993) “Procedure for Introducing Foreign DNA into Plants”, In: Methods in Plant Molecular Biology and Biotechnology, Glick and Thompson, eds., CRC Press, Inc., Boca Raton, pages 67-88; and Andrew Bent in, Clough S J and Bent A F, (1998) “Floral dipping: a simplified method for Agrobacterium-mediated transformation of Arabidopsis thaliana”). The methods chosen vary with the host plant, and include chemical transfection methods such as calcium phosphate, polyethylene glycol (PEG) transformation, microorganism-mediated gene transfer such as Agrobacterium (Horsch et al., 1985), electroporation, protoplast transformation, micro-injection, flower dipping and biolistic bombardment.

[0069] Agrobacterium-Mediated Transformation The most widely utilized method for introducing an expression vector into plants is based on the natural transformation system of Agrobacterium tumefaciens and A. rhizogenes which are plant pathogenic bacteria which genetically transform plant cells. The Ti and Ri plasmids of A. tumefaciens and A. rhizogenes, respectfully, carry genes responsible for genetic transformation of plants (See, for example, Kado, 1991). Descriptions of the Agrobacterium vector systems and methods for Agrobacterium-mediated gene transfer are provided in Gruber et al. (1993). and Moloney et al., (1989).

[0070] Transgenic Arabidopsis plants can be produced easily by the method of dipping flowering plants into an Agrobacterium culture, based on the method of Andrew Bent in, Clough S J and Bent A F, 1998. Floral dipping: a simplified method for Agrobacterium-mediated transformation of Arabidopsis thaliana. Wild type plants are grown until the plant has both developing flowers and open flowers. The plants are inverted for 1 minute into a solution of Agrobacterium culture carrying the appropriate gene construct. Plants are then left horizontal in a tray and kept covered for two days to maintain humidity and then righted and bagged to continue growth and seed development. Mature seed is bulk harvested.

### Direct Gene Transfer

[0071] A generally applicable method of plant transformation is microprojectile-mediated transformation, where DNA is carried on the surface of microprojectiles measuring about 1 to 4 μm. The expression vector is introduced into plant tissues with a biolistic device that accelerates the microprojectiles to speeds of 300 to 600 m/s which is sufficient to penetrate the plant cell walls and membranes. (Sanford et al., 1993; Klein et al., 1992).

[0072] Plant transformation can also be achieved by the Aerosol Beam Injector (ABI) method described in U.S. Pat. Nos. 5,240,842 and 6,809,232. Aerosol beam technology is used to accelerate wet or dry particles to speeds enabling the particles to penetrate living cells. Aerosol beam technology employs the jet expansion of an inert gas as it passes from a region of higher gas pressure to a region of lower gas pressure through a small orifice. The expanding gas accelerates aerosol droplets, containing nucleic acid molecules to be introduced into a cell or tissue. The accelerated particles are positioned to impact a preferred target, for example a plant cell. The particles are constructed as droplets of a sufficiently small size so that the cell survives the penetration. The transformed cell or tissue is grown to produce a plant by standard techniques known to those in the applicable art.

### Regeneration of Transformants

[0073] The development or regeneration of plants from either single plant protoplasts or various explants is well known in the art (Weissbach and Weissbach, 1988). This regeneration and growth process typically includes the steps of selection of transformed cells, culturing those individualized cells through the usual stages of embryonic development through the rooted plantlet stage. Transgenic embryos and seeds are similarly regenerated. The resulting transgenic rooted shoots are thereafter planted in an appropriate plant growth medium such as soil.

[0074] The development or regeneration of plants containing the foreign, exogenous gene that encodes a polypeptide of interest introduced by Agrobacterium from leaf explants can be achieved by methods well known in the art (see for example Horsch et al., 1985). In this procedure, transformants are cultured in the presence of a selection agent and in a medium that induces the regeneration of shoots in the plant strain being transformed as described (Fraley et al., 1983). In particular, U.S. Pat. No. 5,349,124 (specification incorporated herein by reference) details the creation of genetically transformed lettuce cells and plants resulting therefrom which express hybrid crystal proteins conferring insecticidal activity against Lepidopteran larvae to such plants.

[0075] This procedure typically produces shoots within two to four months and those shoots are then transferred to an appropriate root-inducing medium containing the selective agent and an antibiotic to prevent bacterial growth. Shoots that rooted in the presence of the selective agent to form plantlets are then transplanted to soil or other media to allow the production of roots. These procedures vary depending upon the particular plant strain employed, such variations being well known in the art.

[0076] Preferably, the regenerated plants are self-pollinated to provide homozygous transgenic plants, or pollen obtained from the regenerated plants is crossed to seed-grown plants of agronomically important, preferably inbred lines. Conversely, pollen from plants of those important lines is used to pollinate regenerated plants. A transgenic plant of the present invention containing a desired polypeptide is cultivated using methods well known to one skilled in the art.

[0077] A preferred transgenic plant is an independent segregate. A more preferred transgenic plant is homozygous. Seed from a transgenic plant may be grown in the field or greenhouse, and resulting sexually mature transgenic plants are self-pollinated to generate true breeding plants.

### EXAMPLES

### 1. Identification of Drought Tolerant Mutants Using a Unique Genetic Screening

[0078] In many plants, including Arabidopsis, occurrence of a drought stress during reproductive development results in dramatically reduced silique length, and as a consequence there is a reduction in overall seed production. As Arabidopsis continually produces siliques so a transient drought stress during flowering results in aborted or shortened siliques only in a limited section of the main inflorescence corresponding with the timing of the stress. Once plants are removed from the stress, newly produced siliques will develop normally so seeds can be obtained for further propagation and genetic analysis that may underline regulatory elements responsible for reproductive drought tolerance phenotypes. Using this assay, we screened a collection of about 27,000 Arabidopsis T-DNA activation tagged lines (Weigel, et al., 2000), and three mutants, d200-1, 6, and 7 from the same mutant pool, were identified in which the silique length was not dramatically affected by the stress, and it was able to maintain relatively constant. It is possible that the 3 mutants are simply siblings which will be determined by TAIL-PCR for T-DNA localisation.

[0079] These mutant candidates were then advanced to homozygosity that were used for further characterization such as detailed growth assessment under various conditions such as drought and nutrient deficits. Arabidopsis seeds from mutant and control plants were plated onto regular MS media, placed into the cold for 4 days and then into a grow chamber under optimal conditions (22° C.; 18 hr light, ˜200 μE). At one week out of the cold a total of 24 replicates per entry were transplanted into pre-weighed 3″ pot. There are a total of 8 replicates per entry per treatment (drought screen, optimal yield, drought yield). At 3 days into flowering, plants in the drought screen group were watered up to the same weight and weighed daily for 4 consecutive days before being harvested for leaf and stem biomass separately. Plants in the drought yield were also watered up to the same weight and maintained at this weight 2 periods of drought (5 days/each). The drought yield group all started around 3 days into flowering. Optimal plants were maintained under optimal conditions until mature, at which time both the optimal and drought yield groups were harvested for stem and seed biomass.

[0080] All statistical analysis was completed with a two-way ANOVA in JMP 7.0 and significant differences were identified using a student t-test at 10% level of significance.

[0081] The homozygous siblings of the d200 showed significant increase in shoot biomass accumulation at the end of 4-days of water withheld period comparing to their parental control CS907. More importantly, d200-1, 6 and 7 reduced water loss relative to their shoot dry weight by 19%, 13% and 16%, respectively at day 2, and 17%, 7% and 13%, respectively at day 3 comparing to their parental controls, indicating reduced transpiration of the mutants during the drought stress.

TABLE 1
Day 2 and Day 3 water lost relative to their biomass
accumulation for mutant d200s and controls.

| | | Days to | | | | | | | |
|---|---|---|---|---|---|---|---|---|---|
| | | 1st flower | | Shoot DW (g) - Day 0 | | | Shoot DW (g) - Day 4 | | |
| | | | Std | | Std | % | | Std | % |
| Entry | Rep | Mean | Err | Mean | Err | CS907 | Mean | Err | CS907 |
| d200-1 | 9 | 25.2 | 0.2 | 0.567 | 0.016 | 134% | 0.776 | 0.017 | 116% |
| d200-7 | 9 | 24.6 | 0.3 | 0.527 | 0.028 | 124% | 0.753 | 0.021 | 113% |
| d200-6 | 9 | 23.9 | 0.2 | 0.520 | 0.020 | 123% | 0.693 | 0.026 | 104% |
| CS907 | 9 | 217 | 0.4 | 0.424 | 0.025 | — | 0.668 | 0.018 | — |

| | | Water lost in 2 d/ | | | Water lost in 3 d/ | | |
|---|---|---|---|---|---|---|---|
| | | Shoot DW-d 4 | | | Shoot DW-d 4 | | |
| | | | Std | % | | Std | % |
| Entry | Rep | Mean | Err | CS907 | Mean | Err | CS907 |
| d200-1 | 9 | 67.5 | 2.3 | 81% | 93.8 | 2.5 | 83% |
| d200-7 | 9 | 70.3 | 0.7 | 84% | 98.0 | 1.9 | 87% |
| d200-6 | 8 | 72.9 | 1.5 | 87% | 104.3 | 2.2 | 93% |
| CS907 | 9 | 83.7 | 2.6 | 100% | 1124 | 21 | 100% |

(Bold - indicates significant differences to parent control CS907).

### 2. Mapping of Insertion Location in Arabidopsis Genome

[0082] Southern analysis of mutants d200-1, 6 and 7 showed identical banding pattern, suggesting that these mutants are siblings of the same d200 mutant. TAIL PCR was then performed to map the location of T-DNA insertion of the 35S-enhancer using genomic DNA of d200-1. Six arbitrary degenerate (AD) primers of 16 bases were designed to have 128- or 256-fold degenerate, which are able to anneal throughout genome (SEQ ID NO:1 to SEQ ID NO:6). The border primers pSK-35S-F4 (SEQ ID NO:10) and pSK-OCT-R4 (SEQ ID NO:14) specific to the left and right borders of T-DNA were paired with each of AD primers in primary PCR to amplify the genomic sequence near T-DNA insert. Following the primary arbitrary amplification, two nested PCRs were then performed on the diluted primary PCR product using the working AD primers and T-DNA-specific nest primers (e.g. pSK-35S-F3 (SEQ ID NO:9), pSK-35S-F2 (SEQ ID NO:8) and pSK-OCT-R3 (SEQ ID NO:13), pSK-OCT-R2 (SEQ ID NO:12) respectively). After three rounds of TAIL PCR using different nested primers, one specific DNA fragment was amplified from the d200 mutant.

[0083] The specific PCR product amplified from the genome of d200-1 was cleaned through affinity column and then subjected to Sanger sequencing using T-DNA-specific primers such as pSK-35S-F1 (SEQ ID NO:7), pSK-35S-F2 (SEQ ID NO:8), pSK-OCT-R1 (SEQ ID NO:11), pSK-OCT-R2 (SEQ ID NO:12). Sequencing results showed that the enhancer T-DNA is inserted in the intergenic region between At3g27970 and At3g27980 with the border sequence of SEQ ID NO:121. Thus, the T-DNA insert is 967 bp downstream the stop codon of At3g27970 and 1.4 kb upstream the start codon of At3g27980.

### 3. Activation of Genes Near the 35S-Enhancer-Tag

[0084] Total 8 genes are located within 10 kb range from the insertion of 35S-enhancer tag, including At3g27970 (zinc ion binding exonuclease family protein possibly involved in ribosomal RNA (rRNA) processing, named AtExo970 here), At3g27980 (plant pectin methylesterase inhibitor superfamily protein), At3g27990 (putative large non-coding RNA gene), At3g27950 (GDSL-motif esterase/acyltransferase), At3g27960 (Kinesin light chain-related 2, named AtKin960 here), At3g27968 (small unknown protein), At3g27997 (pseudogene) and At3g27999 (plant invertase/pectin methylesterase inhibitor superfamily protein). In order to quantify the effect of 35S enhancer-tag on the expression of these genes, total RNA was extracted from young rosette leaves of d200-1 and control wildtype Columbia (Col). RNase-free DNase was used to remove any genomic DNA contaminant from purified RNA, from which cDNA was synthesized using an oligo-dT primer. Gene-specific primers targeting the transcripts of all the 8 genes (SEQ ID NO:15 to SEQ ID NO:30) were used for RT-qPCR to quantify mRNA accumulation of these genes in young rosette leaves of the mutants in comparison of Col. Arabidopsis gene encoding protein phosphatase 2A subunit A3 (AtPP2AA3, SEQ ID NO:31, SEQ ID NO:32) was selected as internal reference due to its moderate and relatively stable expression in various tissues and under different conditions. RT-qPCR analysis showed that At3g27970 (named AtExo970 in this application) is significantly enhanced in d200-1 with 480 folds of increase in RNA accumulation when compared with the wildtype control. In order to precisely calculate the enhancement on AtExo970 mRNA accumulation, both forward and reverse primers (D200A970-qF3 (SEQ ID NO:23), D200A970-qR3 (SEQ ID NO:24)) were designed to span an intron based on AtExo970 genomic sequence. RT-qPCR using such primers showed that intron-free AtExo970 mRNA was barely detected in wildtype Col while being routinely amplified from d200. In d200 leaf cells, intron-free AtExo970 mRNA accumulated to an extreme level of 5971 folds of that in wildtype Col, whereas the expression of AtKin960 (SEQ ID NO:422; SEQ ID NO:423) was mildly elevated 4 times and the remaining 6 genes are not affected. Over-expression of AtExo970 in Arabidopsis recapitulated the phenotypes of d200s, whereas Over-expression of AtKin960 mildly improved drought tolerance of the transgenic Arabidopsis.

### 4. Functional Analysis of AtExo970 Gene

### 4.1 AtExo970 Gene Structure and Protein Properties

[0085] AtExo970 mRNA has a sequence of 1417 nucleotides (SEQ ID NO:122), which includes the coding region of 1074 nucleotides (SEQ ID NO:123), 5′ UTR region of 127 nucleotides (SEQ ID NO:126) and 3′ UTR region of 216 nucleotides (SEQ ID NO:127). AtExo970 gene encodes for a protein of 357 amino acids (SEQ ID NO:124). This protein contains 2 C2H2 Zinc finger motifs (“caacyrqfnklehlvehm” and “cgvckkhcrsfeslrehl”) at its N-terminus, which are involved in binding to RNA molecules; and a Rex4 catalytic domain of 165 residues at its C-terminus, which is responsible for an exoribonuclease activity. In addition, between the zinc finger motif and Rex4 catalytic domain, there is a predicted loose Heme-nitric oxide/oxygen binding (H-NOX) domain (SEQ ID NO:125) possibly functioning as sensor for gaseous signaling agent of nitric oxide (Domingos et al., 2015). The loose H-NOX motif in AtExo970 may play a role in signal transduction between environmental responses and ribosomal RNA processing or ribosome biogenesis.

[0086] AtExo970 has a very low basal expression in wildtype Arabidopsis. Its cDNA sequence was first reported to be isolated from hormone treated Arabidopsis callus (GenBank: Bx824546). In high throughput proteomic analysis, oligopeptides of AtExo970 protein were found in samples from cell culture, seeds and juvenile leaves.

[0087] A homolog of AtExo970 is located on chromosome 5 of Arabidopsis (At5g40310, named as AtExo310 in this application). AtExo310 shares 84% protein sequence identity with AtExo970 (SEQ ID NO:130) and 76% nucleotide sequence identity (SEQ ID NO:131).

### 4.2 Expression Profile of AtExo970 in Arabidopsis

[0088] In order to analyze the expression profile of AtExo970 in different organs or tissues, primers P7970-EcoRF (SEQ ID NO:33) And P7970-XhoR (SEQ ID NO:34) were designed to amplify the promoter sequence of AtExo970 (SEQ ID NO:128) using Col genomic DNA as template. The promoter of 708 bp was cloned upstream the GUS gene replacing 35S promoter in vector pEG-35S-IntrnGUS by EcoRI/XhoI double digestion, resulting in construct pEG-P7970-IntrnGUS.

[0089] Transgenic Arabidopsis plants carrying P7970-IntrnGUS cassette were obtained by flower-dipping transformation and routine line advancement. Young seedlings growing in MS medium or flowering plants growing in pots were used for GUS staining. As indicated by GUS staining, P7970 promoter from AtExo970 gene has strong activity in the roots of young seedlings and weak activity in true leaves. No GUS activity was seen in mature leaves and stems. In opening flowers, dark blue GUS staining was detected in the tip of flower stigma, where the fertilization happens.

### 4.3 Subcellular Localization of AtExo970 Protein in Arabidopsis

[0090] Phylogenetic-based Gene Ontology (GO) predicted that AtExo970 might be a nuclear-localized protein (Gaudet et al., 2011). In order to analyze the subcellular localization of AtExo970 in Arabidopsis, green fluorescence protein (eGFP) was fused to the N-terminal of AtExo970 protein. Two primers (AtExo970-XmaF, SEQ ID NO:35, and AtExo970-BamR, SEQ ID NO:36) were designed to amplify the coding sequence of AtExo970 (SEQ ID NO:123) from cloned AtExo970 cDNA. The insertion of AtExo970 CDS downstream eGFP sequence in pEGAD vector by BamHI-XmaI double digestion resulted in an in-frame fusion of eGFP with AtExo970 (pEGAD-35S-eGFP:AtExo970).

[0091] Homozygous T3 Arabidopsis plants carrying 35S-eGFP:AtExo970 cassette were obtained by flower-dipping transformation and subsequent generation advancement. Strong GFP signal was seen in roots or root hairs of young transgenic seedlings. Within root or root-hair cells, eGFP:AtExo970 was found in cytoplasm rather than nuclear. In the leaf epidermal cells, weak GFP signal was also seen in cytoplasm around large vacuole. Thus, AtExo970 is likely a cytoplasm-localized riboexonuclease involving in RNA processing or ribosome biogenesis in cytoplasm, however, further investigation is required to confirm the initial observation.

### 4.4 Response of AtExo970 to Environmental Factors

[0092] AtExo970 has a very low basal expression in Arabidopsis leaves and flowers that is barely detectable under normal growth condition. Analysis of AtExo970 promoter sequence (SEQ ID NO:128) showed the presence of a cis-element ((A)AACAAA(C)) at 2 different locations within the 708 bp-promoter. This cis-element possibly involves in gene expression in endosperm or under anaerobic growth condition. The closest homolog of AtExo970 in soybean (GmExo090, SEQ ID NO:173) also has a very low basal expression in soybean tissues. Analysis of GmExo090 promoter sequence (SEQ ID NO:413) showed that there are 7 repeats of the cis-element within the 2 kb-promoter sequence.

### 5. Loss-of-Function of AtExo970 in T-DNA Knockout Arabidopsis Line

[0093] A T-DNA insertion knockout line (GK-749C02) was ordered from ABRC (http://abrc.osu.edu/stocks/345062). GK-749C02 has T-DNA insertion at the 4^{th} exon of AtExo970 genomic DNA. A homozygous T4 sibling was confirmed by PCR using primers (D200A970-qF2, SEQ ID NO:20; AtExo970-SeqR1, SEQ ID NO:37) flunking the insert. T-DNA insertion breaks AtExo970 protein at 221^{st} residue, which falls into the middle of REX4 riboexonuclease domain.

[0094] Intact mRNA of AtExo970 was undetectable in GK-749C02 plants when primers flunking the insert (D200A970-qF2, SEQ ID NO:20; D200A970-qR4, SEQ ID NO:38) were used for qPCR. However, partial RNA fragment was detectable when primers upstream (D200A970-qF2, SEQ ID NO:20; D200A970-qR2, SEQ ID NO:22) or downstream (D200A970-qF3, SEQ ID NO:23; D200A970-qR3, SEQ ID NO:24) the insert was used.

[0095] Under optimal condition, GK-749C02 has no visible difference from its segregated nulls and wildtype Col in their development from seedlings to mature plants. This is in agreement with the observation that AtExo970 has an extreme low expression under normal growth conditions.

### 6. Overexpression of AtExo970 in Arabidopsis

### 6.1 Constitutive Overexpression of AtExo970 in Arabidopsis Improves Drought Tolerance and Productivity

[0096] A genomic DNA fragment of AtExo970 was amplified from wildtype Arabidopsis Col-0. Two primers (AtExo970-SalF2, SEQ ID NO:39; AtExo970-XbaR2, SEQ ID NO:40) were designed to amplify AtExo970 genomic sequence of 2065 bp (SEQ ID NO:129) from purified genomic DNA of Col-0. The amplified AtExo970 gDNA fragment was inserted into pEarleyGate binary vector downstream a 35S promoter by SaII-XbaI or XhoI-XbaI double digestion of PCR fragment and pEarleyGate plasmid respectively. This cloning resulted in the construct pEG-35S-gAtExo970.

[0097] Arabidopsis Col-0 plants were flower-dipped with Agrobacterium tumefaciens (EHA105) carrying pEG-35S-gAtExo970 plasmid. Homozygous T3 lines containing 35S-gAtExo970 cassette were obtained through routine line advancement. Single-insert transgenic lines were selected based on Southern blot and progeny segregation on MS medium containing Basta of 10 mg/L.

[0098] 14 of T3 homozygous transgenic lines of 35S-gAtExo970 were used for further molecular and physiological analyses. qPCR using primer pair (D200A970-qF2, SEQ ID NO:20; D200A970-qR2, SEQ ID NO:22) showed that AtExo970 mRNA level in the transgenic lines increased to 456-625 folds of wildtype Col-0 in rosette leaves. Most of these lines also have AtExo970 expression 3-4 folds higher than the original mutant d200. We evaluated plant growth and development as well as their drought tolerance determined by plant water loss (mainly caused by transpiration) during drought stress and final seed yield post drought stress. Comparing to their parent control Col and segregated null, most transgenic lines, similar to mutant d200, delayed in flowering, increased in biomass accumulation, reduced in water loss relative to their biomass accumulation and had better protection of seed yield, confirming that AtExo970 was responsible for drought tolerance of d200, and overexpression of AtExo970 in Arabidopsis indeed improves drought tolerance. The representative results of 3 transgenic lines are presented in Table 2 and 3.

TABLE 2
Day 4 detailed biomass and water loss relative to their biomass parameters
for 3 lines of 35S-gAtExo970 and their controls (null and Col) along
with mutant d200-8 and its control (CS907)
Drought Screen - day 4

| | |
|---|---|
| Days to flower | Shoot DW (g) |

| Entry | Rep# | Mean | Std Err | Mean | Std Err | % null | % Col |
|---|---|---|---|---|---|---|---|
| 4-2 | 8 | 24.8 | 0.4 | 1.072 | 0.010 | 124% | 125% |
| 13-7 | 8 | 23.8 | 0.2 | 1.083 | 0.025 | 125% | 127% |
| 18-9 | 8 | 24.4 | 0.3 | 1.073 | 0.034 | 124% | 125% |
| Null | 8 | 20.9 | 0.3 | 0.863 | 0.026 | — | 97% |
| Col | 8 | 21.5 | 0.4 | 0.855 | 0.035 | 103% | — |
| 200-8 | 8 | 24.1 | 0.2 | 1.060 | 0.041 | — | 108% |
| CS907 | 8 | 22.4 | 0.3 | 0.978 | 0.027 | — | — |

| | | Water lost in 2 d/ | | | | Water lost in 3 d/ | | | | Water lost in 4 d/ | | | |
|---|---|---|---|---|---|---|---|---|---|---|---|---|---|
| | | Shoot DW-d 4 | | | | Shoot DW-d 4 | | | | Shoot DW-d 4 | | | |
| | | | Std | % | % | | Std | % | % | | Std | % | % |
| Entry | Rep# | Mean | Err | null | Col | Mean | Err | null | Col | Mean | Err | null | Col |
| 4-2 | 8 | 76.85 | 0.63 | 83% | 84% | 84.62 | 0.61 | 81% | 82% | 88.13 | 0.68 | 80% | 82% |
| 13-7 | 8 | 76.24 | 1.51 | 82% | 83% | 84.36 | 1.84 | 81% | 82% | 87.71 | 1.96 | 80% | 81% |
| 18-9 | 8 | 77.93 | 2.13 | 84% | 85% | 85.89 | 2.84 | 82% | 84% | 89.10 | 3.04 | 81% | 83% |
| Null | 8 | 92.72 | 3.53 | — | 101% | 104.79 | 3.09 | — | 102% | 110.05 | 3.23 | — | 102% |
| Col | 8 | 91.49 | 2.59 | 99% | — | 102.63 | 2.62 | 98% | — | 107.77 | 2.80 | 98% | — |
| 200-8 | 8 | 76.28 | 2.30 | — | 87% | 86.17 | 3.21 | — | 91% | 90.02 | 3.54 | — | 92% |
| CS907 | 8 | 87.23 | 2.40 | — | — | 94.97 | 2.66 | — | — | 98.09 | 2.86 | — | — |

(Bold - indicates significant difference to segregated null, italics - significant difference to Col).

TABLE 3
Yield parameters for representative lines of 35S-gAtExo970 and controls
(null and Col) along with mutant d200-8 and its controls (CS907)
under both optimal conditions and after drought stress.
Optimal

| | | Seed Yield (g) | | | Stem DW (g) | | |
|---|---|---|---|---|---|---|---|
| Entry | # Reps | Mean | Std Err | % col | Mean | Std Err | % col |
| 4-2 | 8 | 1.12 | 0.06 | 101% | 2.78 | 0.12 | 105% |
| 13-7 | 8 | 1.30 | 0.09 | 118% | 2.83 | 0.07 | 107% |
| 18-9 | 8 | 1.08 | 0.09 | 98% | 2.75 | 0.11 | 104% |
| Col | 8 | 1.10 | 0 16 | — | 2.64 | 0.10 | — |
| 200-8 | 8 | 1.35 | 0.06 | 92% | 2.90 | 0.14 | 99% |
| CS907 | 8 | 1.46 | 0.10 | — | 2.93 | 0.12 | — |

Drought

| | | Seed Yield (g) | | | | | Stem DW (g) | | | | |
|---|---|---|---|---|---|---|---|---|---|---|---|
| | | | Std | % | % | % | | Std | % | % | % |
| Entry | # Reps | Mean | Err | col | opt | prot'n | Mean | Err | col | opt | prot'n |
| 4-2 | 8 | 1.06 | 0.02 | 119% | 95% | 26% | 2.33 | 0.05 | 108% | 84% | 2% |
| 13-7 | 8 | 1.05 | 0.04 | 118% | 81% | 12% | 2.30 | 0.06 | 107% | 81% | −1% |
| 18-9 | 8 | 0.90 | 0.04 | 101% | 83% | 14% | 2.35 | 0.07 | 109% | 85% | 3% |
| Col | 8 | 0.89 | 0.03 | — | 69% | — | 2.16 | 0.09 | — | 82% | — |
| 200-8 | 8 | 1.18 | 0.07 | 116% | 87% | 17% | 2.50 | 0.09 | 118% | 86% | 14% |
| CS907 | 8 | 1.02 | 0.03 | — | 70% | — | 2.12 | 0.09 | — | 72% | — |

| | | Drought | | | | | | | |
|---|---|---|---|---|---|---|---|---|---|
| | | Total shoot DW | | | | | Total water lost/ | | |
| | | (seeds + stems) (g) | | | | | Shoot DW | | |
| | | | Std | % | % | % | | Std | % |
| Entry | # Reps | Mean | Err | col | opt | prot'n | Mean | Err | col |
| 4-2 | 8 | 3.39 | 0.16 | 111% | 87% | 9% | 85.63 | 1.65 | 85% |
| 13-7 | 8 | 3.35 | 0.19 | 110% | 81% | 3% | 87.15 | 2.64 | 87% |
| 18-9 | 8 | 3.25 | 0.21 | 107% | 85% | 7% | 88.66 | 2.56 | 88% |
| Col | 8 | 3.05 | 0.28: | — | 78% | — | 100.61 | 3.74 | — |
| 200-8 | 8 | 3.68 | 0.40 | 117% | 86% | 14% | 79.51 | 3.06 | 84% |
| CS907 | 8 | 3.14 | 0.28 | — | 72% | — | 95.14 | 3.51 | — |

(bold - indicates significant difference to segregated null control, italics - significant difference to Col, % prot'n = % protection as the difference from optimal conditions relative to the control).

### 6.2 Conditional Expression of AtExo970 in Arabidopsis

[0099] To mitigate the possible side-effect of constitutive over-expression of exonuclease on Arabidopsis growth and development such as delayed flowering under normal condition, AtRD29A promoter has been used to regulate the expression of AtExo970 in the construct of pEG-PRd29A-AtExo970 as described below, and root specific promoter will also be used to localize the effect.

[0100] AtExo970 cDNA fragment (SEQ ID NO:131) was PCR amplified from total RNA of d200-1 leaves using AtExo970-SalF1 (SEQ ID NO:47) and AtExo970-XbaR1 (SEQ ID NO:48) primers.

[0101] The PCR product was double digested with Sall and XbaI. For cloning convenience, pEG-PRd29A-BnExo317 from Section 8.2 was used as starting vector. BnExo317 sequence was first removed from pEG-PRd29A-BnExo317 by XhoI-XbaI double digestion, and then replaced with SaII-XbaI digested AtExo970 cDNA. The cloning yielded construct pEG-PRd29A-AtExo970.

[0102] Arabidopsis Col-0 plants were flower-dipped with A. tumefaciens (EHA105) carrying pEG-PRd29A-AtExo970 plasmid. Single-insert transgenic lines were selected based on Southern analysis and confirmed by progeny segregation of subsequent generations on MS medium containing Basta of 10 mg/L. T3 homozygous transgenic lines are being obtained through routine line advancement and will be used for molecular analysis and physiological assessment. Subsequently, plant growth & development as well as tolerance to drought will be evaluated.

### 6.3 Overexpression of AtExo970 in Transgenic Arabidopsis Increases ABA Sensitivity at Emergence of Cotyledon and First Leaf

[0103] For each ABA plate assessment, a total of 5 replicates of 30 seeds/plate per entry per ABA concentration were seeded. The plates were placed into the cold for 4 days and then into a grow chamber under optimal conditions (22° C.; 18 hr light, ˜200 μE). ABA concentrations of 0 μM ABA (optimal) and 1.0 μM ABA were used. Starting at 2 days out of the cold, germination was recorded on each plate for 5 consecutive days. Cotyledon emergence was recorded from the starting day for 5 consecutive days and leaf emergence were recorded as it started until 10 days, and the % of emergence (cotyledon and leaf) was then calculated. All statistical analysis was completed with a two-way ANOVA in JMP 7.0 and significant differences were identified using a student t-test at 10% level of significance.

[0104] Comparing to their controls, most transgenic and mutant d200-8 seeds germinated well close to 100% under optimal and in the presence of exogenous ABA, showing that overexpression of AtExo970 didn't affect ABA sensitivity at the germination level. However, most of the transgenic lines had slight delay in cotyledon and first leaf emergence in the presence of 0.5 uM and 1 uM ABA, indicating that overexpression of AtExo970 increased ABA sensitivity at these stages of plant growth and development. This result suggests that ABA sensitivity of these transgenic plants may play a role in their drought tolerance.

TABLE 4
% germination at day 5, % cotyledon emergence at day 5 and % leaf emergence
at day 10 for selected lines of 35S-gAtExo970 and mutant d200-8
Optimal

| | | % germination- d 5 | | % cotyledon - d 5 | | % leaf - d 10 | |
|---|---|---|---|---|---|---|---|
| # Reps | Entry | Mean | Std Err | Mean | Std Err | Mean | Std Err |
| 5 | 4-2 | 98.7% | 0.0 | 100.0% | 0.0 | 99.4% | 0.0 |
| 5 | 10-6 | 100.0% | 0.0 | 100.0% | 0.0 | 100.7% | 0.0 |
| 5 | 13-7 | 100.0% | 0.0 | 99.4% | 0.0 | 100.0% | 0.0 |
| 5 | 18-9 | 84.0% | 0.0 | 100.0% | 0.0 | 99.4% | 0.0 |
| 5 | Null | 100.0% | 0.0 | 100.0% | 0.0 | 99.4% | 0.0 |
| 5 | Col | 99.4% | 0.0 | 100.0% | 0.0 | 100.0% | 0.0 |
| 5 | 200-8 | 99.4% | 0.0 | 100.0% | 0.0 | 100.0% | 0.0 |
| 5 | Null | 100.0% | 0.0 | 99.4% | 0.0 | 100.0% | 0.0 |

1.0 μM ABA

| | | % germination- d 5 | | | | % cotyledon - d 5 | | | | % leaf - d 10 | | | |
|---|---|---|---|---|---|---|---|---|---|---|---|---|---|
| | | | Std | Diff to | Diff to | | Std | Diff to | Diff to | | Std | Diff to | Diff to |
| # Reps | Entry | Mean | Err | null | Col | Mean | Err | null | Col | Mean | Err | null | Col |
| 5 | 4-2 | 96.7% | 0.0 | −3% | −1% | 71.8% | 0.1 | 4% | −23% | 53.5% | 0.0 | −11% | −38% |
| 5 | 10-6 | 99.4% | 0.0 | −1% | 2% | 62.5% | 0.1 | −5% | −32% | 62.4% | 0.1 | −2% | −29% |
| 5 | 13-7 | 98.1% | 0.0 | −2% | 1% | 60.4% | 0.1 | −7% | −34% | 75.1% | 0.1 | 11% | −17% |
| 5 | 18-9 | 85.0% | 0.0 | −15% | −13% | 38.9% | 0.0 | −29% | −55% | 44.2% | 0.1 | −20% | −48% |
| 5 | Null | 100.0% | 0.0 | — | 3% | 67.7% | 0.0 | — | −27% | 64.6% | 0.1 | — | −27% |
| 5 | Col | 97.5% | 0.0 | −3% | — | 94.3% | 0.0 | 27% | — | 91.8% | 0.1 | 27% | — |
| 5 | 200-8 | 100.0% | 0.0 | 6% | 2% | 57.5% | 0.1 | −4% | −37% | 66.3% | 0.1 | 31% | −26% |
| 5 | Null | 94.2% | 0.0 | — | — | 61.1% | 0.1 | — | — | 35.4% | 0.1 | — | — |

(bold - indicates significant difference to segregated null, italics - significant difference to Col)

### 6.4 Overexpression of AtExo970 in Transgenic Arabidopsis Plants Improves Pollen Viability Under Optimal and Drought Conditions

[0105] Pollen samples were taken from the drought plants on day 2 (19 to 25% initial soil water content) and from the same developmental stage in the optimal group. Pollen sampled were counted as the number of germinated pollens out of 100 pollen grains. A total of three 100 counts for each of the 4 replicates sampled per entry were done. All of the data for this study was analyzed using a two-way ANOVA in JMP 7.0 and significant differences were identified using the Student-T test at 10% level of significance.

[0106] Under optimal condition, pollen germination rate of most transgenic lines was slightly higher comparing to their null control; under drought stress, the difference was significantly amplified, suggesting that overexpression of AtExo970 in transgenic Arabidopsis plants improves seed yield under drought stress at least partly by enhancing pollen viability of these plants. Pollen samples were taken from the drought plants on day 2 (19 to 25% initial soil water content) and from the same developmental stage in the optimal group. Pollen germination was evaluated. A total of three 100 counts for each of the 4 replicates sampled per entry were done. All of the data for this study was analyzed using a two-way ANOVA in JMP 7.0 and significant differences were identified using the Student-T test at 10% level of significance.

TABLE 5
Pollen viability under both optimal and drought conditions for the
best drought tolerant lines of pEG-35S-gAtExo970 and mutant d200-8

| | | Optimal | | | Drought - Day 2 | | |
|---|---|---|---|---|---|---|---|
| Entry | Rep# | Mean | Std Err | % null | Mean | Std Err | % null |
| 4-2 | 12 | 48.0 | 1.3 | 108% | 43.6 | 0.9 | 120% |
| 5-3 | 12 | 47.4 | 1.5 | 107% | 50.8 | 1.9 | 139% |
| 14-11 | 12 | 49.2 | 1.2 | 111% | 44.9 | 1.2 | 123% |
| 16-9 | 12 | 46.3 | 2.3 | 104% | 43.2 | 1.5 | 119% |
| 18-9 | 12 | 43.3 | 0.9 | 97% | 39.6 | 1.6 | 109% |
| Null | 12 | 40.45 | 3.15 | — | 36.3 | 1.5 | — |
| 200-8 | 12 | 53.7 | 1.2 | 119% | 39.8 | 2.0 | 108% |
| CS907 | 12 | 45.3 | 2.8 | 100% | 370 | 1:5 | 100% |

(bold - indicates significant differences to the segregated nulls).

### 6.5 Overexpression of AtExo970 in Transgenic Arabidopsis Plants Improves Plant Productivity Under Optimal and Deficient N or P

[0107] A hydroponic assessment of the selected drought tolerant lines (5-3, 4-2, 25-8, 18-9, 22-8, 14-11, 16-9) along with their control (null and Col) and the original mutant d200-8 along with its control (CS907) was conducted to evaluate plant growth under optimal, low nitrogen (1/10 optimal) and low phosphorus (1/100 optimal) conditions. Arabidopsis were directly seeded into 70% agar wells in the hydroponic trays. The trays placed in the cold (5° C.) for 3 days and then into a 3-tier grow chamber under optimal conditions (22° C.; 18 hr light, ˜200 μE). At 2 weeks out of the cold, water was replaced with a modified Hoagland's solution for each treatment: optimal, low P (1/100), low N (1/10). Nutrient solution was replaced twice/week and photographs taken at the start of the nutrient treatment, 1 week and 2 weeks into the stress. All plants were maintained in the nutrient treatments until 1 week into flowering, at which point each plant was harvested for both shoot and root biomass.

[0108] Under optimal conditions all the transgenic lines and d200-8 had significant higher shoot and root biomass comparing to their controls; under low nitrogen (1/10^{th} optimal) condition, the transgenic lines and d200-8 overall produced similar amount of shoot biomass, but significantly higher amount of root biomass comparing to their controls; under low phosphorus (1/100^{th} optimal) conditions, the amount of shoot biomass was unchanged overall, but again the yield of roots of the transgenic lines and d200-8 was significantly enhanced.

TABLE 6
Shoot biomass (g) and root biomass (g) of selected transgenic lines
and controls (null and Col) along with mutant d200-8 and its
controls (CS907) under optimal hydroponic conditions.
Optimal

| | | Shoot DW (g) | | | | Root DW (g) | | | |
|---|---|---|---|---|---|---|---|---|---|
| | | | Std | % | % | | Std | % | % |
| Entry | # reps | Mean | Err | Col | Null | Mean | Err | Col | Null |
| 14-11 | 8 | 0.259 | 0.020 | 170% | 176% | 0.033 | 0.002 | 220% | 206% |
| 16-9 | 9 | 0.217 | 0.017 | 143% | 148% | 0.027 | 0.002 | 177% | 169% |
| 18-9 | 9 | 0.220 | 0.011 | 144% | 149% | 0.025 | 0.003 | 168% | 156% |
| 22-8 | 9 | 0.258 | 0.015 | 169% | 175% | 0.031 | 0.002 | 205% | 194% |
| 25-8 | 9 | 0.214 | 0.018 | 141% | 146% | 0.027 | 0.003 | 180% | 169% |
| 4-2 | 9 | 0.256 | 0.017 | 168% | 174% | 0.034 | 0.003 | 225% | 213% |
| 5-3 | 9 | 0.206 | 0.016 | 135% | 140% | 0.022 | 0.002 | 145% | 138% |
| Null | 9 | 0.145 | 0.013 | 95% | — | 0.016 | 0.001 | 107% | — |
| Col | 8 | 0.153 | 0.019 | — | 104% | 0.015 | 0.002 | — | 94% |
| 200-8 | 9 | 0.210 | 0.016 | 164% | — | 0.030 | 0.003 | 214% | — |
| CS907 | 9 | 0.128 | 0.010 | — | — | 0.014 | 0.002 | — | — |

(bold - significant difference to own control, italics - significant difference to Col, * note: the mutant d200-8 is compared to the CS907 not Col).

TABLE 7
Shoot biomass (g) and root biomass (g) for selected transgenic lines
and controls along with the mutant d200-8 and its controls (null and
Col) under low nitrogen (1/10^{th} optimal) hydroponic conditions.
Low N (1/10th)

| | | shoot DW (g) | | | | Root DW (g) | | | |
|---|---|---|---|---|---|---|---|---|---|
| | | | Std | % | % | | Std | % | % |
| Entry | # reps | Mean | Err | Col | Null | Mean | Err | Col | Null |
| 14-11 | 8 | 0.060 | 0.004 | 99% | 94% | 0.025 | 0.003 | 191% | 192% |
| 16-9 | 9 | 0.060 | 0.005 | 98% | 94% | 0.024 | 0.003 | 181% | 185% |
| 18-9 | 9 | 0.072 | 0.004 | 118% | 113% | 0.022 | 0.002 | 171% | 169% |
| 22-8 | 9 | 0.058 | 0.003 | 95% | 91% | 0.021 | 0.002 | 159% | 162% |
| 25-8 | 9 | 0.068 | 0.004 | 112% | 106% | 0.019 | 0.002 | 148% | 146% |
| 4-2 | 9 | 0.071 | 0.004 | 115% | 111% | 0.028 | 0.002 | 214% | 215% |
| 5-3 | 9 | 0.052 | 0.004 | 85% | 81% | 0.017 | 0.002 | 132% | 131% |
| Null | 9 | 0.064 | 0.002 | 105% | — | 0.013 | 0.001 | 100% | — |
| Col | 9 | 0.061 | 0.002 | — | 95% | 0.013 | 0.001 | — | 100% |
| 200-8 | 9 | 0.063 | 0.003 | 103% | — | 0.021 | 0.001 | 183% | — |
| CS907 | 9 | 0.061 | 0.002 | — | — | 0.012 | 0.002 | 100% | — |

(bold - significant difference to null control, italics - significant difference to Col, * note: the at mutant is compared to the CS907 not Col)

TABLE 8
Shoot biomass (g) and root biomass (g) for selected transgenic lines
and controls along with the mutant d200-8 and its control under
low phosphorus (1/100^{th} optimal) hydroponic conditions.
Low P (1/100)

| | | shoot DW (g) | | | | Root DW (g) | | | |
|---|---|---|---|---|---|---|---|---|---|
| | | | Std | % | % | | Std | % | % |
| Entry | # reps | Mean | Err | Col | Null | Mean | Err | Col | Null |
| 14-11 | 8 | 0.068 | 0.006 | 84% | 87% | 0.020 | 0.002 | 126% | 131% |
| 16-9 | 9 | 0.077 | 0.009 | 95% | 98% | 0.022 | 0.002 | 137% | 142% |
| 18-9 | 9 | 0.084 | 0.006 | 103% | 107% | 0.022 | 0.002 | 137% | 142% |
| 22-8 | 9 | 0.084 | 0.005 | 103% | 107% | 0.023 | 0.002 | 141% | 147% |
| 25-8 | 9 | 0.075 | 0.008 | 92% | 96% | 0.016 | 0.004 | 99% | 103% |
| 4-2 | 9 | 0.088 | 0.003 | 108% | 112% | 0.025 | 0.002 | 152% | 158% |
| 5-3 | 9 | 0.063 | 0.004 | 77% | 80% | 0.017 | 0.002 | 106% | 111% |
| Null | 9 | 0.077 | 0.006 | 95% | — | 0.016 | 0.002 | 100% | — |
| Col | 9 | 0.081 | 0.003 | — | 105% | 0.016 | 0.001 | — | 100% |
| 200-8 | 9 | 0.078 | 0.005 | 113% | — | 0.022 | 0.001 | 168% | — |
| CS907 | 9 | 0.069 | 0.004 | — | — | 0.013 | 0.001 | 100% | — |

(bold - significant difference to null control, italics - significant difference to Col, * note: the at mutant is compared to the CS907 not Col).

### 7. Constitutive Over-Expression of AtExo310, a Sequence Homolog of AtExo970 in Arabidopsis for Improvement of Drought Tolerance

[0109] AExo310 (SEQ ID NO:130) is the close homolog of AtExo970 in Arabidopsis, which share an identity of 84% in their protein sequence. AtExo310 has an expression pattern similar to AtExo970 in various tissues. To further elucidate its function, the cDNA of AtExo310 (SEQ ID NO:131) was amplified using primers AtExo310-BglF2 (SEQ ID NO:41) and AtExo310-XbaR1 (SEQ ID NO:42) and then cloned into pEarelyGate binary vector by BgIII-XbaI and BamHI-XbaI digestion respectively. This cloning produced construct pEG-35S-AtExo310, in which AtExo310 was driven by 35S promoter.

[0110] Arabidopsis Col-0 plants were flower-dipped with A. tumefaciens (EHA105) carrying pEG-35S-AtExo310 plasmid. Homozygous T3 lines were obtained through routine line advancement. Single-insert transgenic lines were selected based on Southern blot and progeny segregation on MS medium containing Basta of 10 mg/L.

### 8. Over-Expression of BnExo317 in Arabidopsis Improves Drought Tolerance

### 8.1. Constitutive Over-Expression of BnExo317 in Arabidopsis

[0111] Blastp query of AtExo970 protein sequence on canola (Brassica napus) genome database (http://www.genoscope.cns.fr/blat-server/cgi-bin/colza/webBlat/) showed that there are 6 close homologs of AtExo970 in canola A or C genomes. They are BnaA06g31730D (named here as BnExo317, SEQ ID NO:133), BnaC02g37170D (named here as BnExo170, SEQ ID NO:136), BnaA02g29140D (named here as BnExo140, SEQ ID NO:139), BnaA09g02180D (named here as BnExo180, SEQ ID NO:142), BnaC07g24840D (named here as BnExo840, SEQ ID NO:145), and BnaC09g01580D (named here as BnExo580, SEQ ID NO:148), respectively. All the canola homologs consist of 357 amino acids, same as AtExo970 protein except for BnExo140, which has one amino acid less. AtExo970 shares a very high identity of 92-94% with these canola homologs.

[0112] The nucleotide sequences of cDNA and genomic DNA for BnExo317, BnExo170, BnExo140, BnExo180, BnExo840, and BnExo580 are listed as SEQ ID NO:134, SEQ ID NO:135, SEQ ID NO:137, SEQ ID NO:138, SEQ ID NO:140, SEQ ID NO:141, SEQ ID NO:143, SEQ ID NO:144, SEQ ID NO:146, SEQ ID NO:147, SEQ ID NO:149, SEQ ID NO:150.

[0113] Primer BnExo317-XhoF1 (SEQ ID NO:43) and BnExo317-XbaR1 (SEQ ID NO:44) were designed to target to the 5′ or 3′ UTR region of BnExo317 gene, which is the closest homolog to AtExo970. cDNA made from Canola flower total RNA was used to amplify the coding sequence of BnExo317 (BnExo317_cDNA, SEQ ID NO:134).

[0114] Amplified BnExo317_cDNA fragment was inserted into pEarleyGate binary vector downstream 35S promoter by XhoI-XbaI double digestion of PCR product and pEarleyGate plasmid. This cloning resulted in the construct pEG-35S-BnExo317.

[0115] Arabidopsis Col-0 plants were flower-dipped with A. tumefaciens (EHA105) carrying pEG-35S-BnExo317 plasmid, and the resultant single-insert transgenic lines selected based on Southern blot and progeny segregation on MS medium containing Basta of 10 mg/I, were advanced to homozygosity at T3. 14 T3 homozygous transgenic lines of 35S-BnExo317 were used for further molecular analysis and physiological assessment, and the results of representative lines are presented here.

[0116] On average, the transgenic lines flowered slightly later than the controls (Col and null). At day 0 prior to drought treatment, most of the transgenic lines had significantly greater shoot dry weight compared to the controls, after the 4-day drought, all lines had significantly increased shoot biomass compared to the controls (Table 9). All transgenic lines lost significantly less water relative to their dry weights comparing to the controls at days 3 and day 4 of drought, and most of the lines had better biomass accumulation and improved water use efficiency (WUE) compared to the controls (Table 10). Thus, the transgenic lines of 35S-BnExo317 closely mirror those of 35S-gAtExo970 with increased biomass and reduced water loss relative to their biomass during the course of drought stress, indicating BnExo317 is a functional homolog of AtExo970.

TABLE 9
Days to flowering and shoot biomass (DW) at day 0 and day 4 harvest
from lines of 35S-BnExo317 in comparison of control null and Col.
Biomass

| | | Days to | | | | | | | | | |
|---|---|---|---|---|---|---|---|---|---|---|---|
| | | 1st Flower | | Shoot DW (g) - day 0 | | | | Shoot DW (g) - day 4 drought | | | |
| | | | Std | | Std | % | % | | Std | % | % |
| Entry | # Reps | Mean | Err | Mean | Err | Col | Null | Mean | Err | Col | Null |
| 27-5 | 8 | 20.9 | 0.4 | 0.430 | 0.035 | 132% | 116% | 0.729 | 0.031 | 133% | 121% |
| 29-6 | 8 | 21.0 | 0.5 | 0.455 | 0.033 | 140% | 122% | 0.672 | 0.028 | 123% | 112% |
| 34-8 | 8 | 20.8 | 0.4 | 0.436 | 0.038 | 134% | 117% | 0.711 | 0.034 | 130% | 118% |
| 47-2 | 8 | 20.8 | 0.2 | 0.429 | 0.015 | 132% | 115% | 0.734 | 0.025 | 134% | 122% |
| 80-5 | 8 | 21.1 | 0.5 | 0.439 | 0.042 | 135% | 118% | 0.774 | 0.021 | 142% | 128% |
| 96-1 | 8 | 20.4 | 0.4 | 0.377 | 0.030 | 116% | 101% | 0.722 | 0.027 | 132% | 120% |
| Null | 8 | 20.3 | 03 | 0.409 | 0.031 | 126% | — | 0.621 | 0.031 | 114% | — |
| Col | 8 | 19.5 | 0.3 | 0.325 | 0.032 | — | 87% | 0.547 | 0.030 | — | 88% |

(Bold- significant difference to the null, italics - significant difference to Col)

TABLE 10
Water loss relative to biomass at day 3 and 4, biomass accumulation
and water use efficiency (WUE) for transgenic lines of
35S-BnExo317 in comparison of control null and Col
Drought

| | | Water lost in 3 d/ | | | | Water lost in 4 d/ | | | | Biomass Accum | | WUE (g shoot/ | |
|---|---|---|---|---|---|---|---|---|---|---|---|---|---|
| | | shoot DW-d 4 | | | | shoot DW-d 4 | | | | (d 0-d 4) | | kg H20) | |
| Entry | | | Std | % | % | | Std | % | % | | % | | % |
| Entry | # Reps | Mean | Err | Col | Null | Mean | Err | Col | Null | Mean | Null | Mean | Null |
| 27-5 | 8 | 92.5 | 2.4 | 75% | 85% | 110.2 | 2.5 | 74% | 82% | 0.30 | 130% | 3.57 | 124% |
| 29-6 | 8 | 94.7 | 2.8 | 77% | 87% | 117.5 | 3.4 | 79% | 87% | 0.22 | 94% | 2.77 | 96% |
| 34-8 | 8 | 91.2 | 2.6 | 74% | 83% | 115.8 | 5.9 | 78% | 86% | 0.27 | 119% | 3.39 | 117% |
| 47-2 | 8 | 90.4 | 2.1 | 73% | 83% | 110.0 | 2.5 | 74% | 82% | 0.31 | 132% | 3.80 | 132% |
| 80-5 | 8 | 92.0 | 1.6 | 75% | 84% | 108.2 | 2.1 | 73% | 81% | 0.34 | 145% | 4.01 | 139% |
| 96-1 | 8 | 95.0 | 3.5 | 77% | 87% | 116.8 | 5.4 | 79% | 87% | 0.34 | 149% | 4.20 | 145% |
| Null | 8 | 104.6 | 3.1 | 85% | — | 129.6 | 5.4 | 87% | — | 0.23 | — | 2.87 | — |
| Col | 8 | 123.1 | 4.6 | — | 113% | 148.5 | 6.6 | — | 115% | 0.22 | 96% | 2.78 | 96% |

(Bold- significant difference to own null, italics - significant difference to Col).

### 8.2. Conditional Expression of BnExo317 in Arabidopsis

[0117] To mitigate the possible side-effect of constitutive over-expression of exonuclease on Arabidopsis growth under normal condition, AtRD29A, a well characterized dehydration-inducible promoter (Kasuga et al., 2004), was selected to drive the expression of BnExo317 upon drought stress. To this end, 35S promoter in pEG-35S-BnExo317 was replaced with AtRd29A promoter.

[0118] Primer AtRd29A-Eco1F (SEQ ID NO:45) and AtRd29A-XhoF1 (SEQ ID NO:46) were designed to amplify AtRd29A promoter of 1172 bp (SEQ ID NO:210) from Arabidopsis genomic DNA. 35S enhancer and promoter was removed from pEG-35S-BnExo317 plasmid by EcoRI-XhoI double digestion, and then replaced with AtRd29A promoter DNA that has previously been double digested with EcoRI and XhoI. This cloning resulted in construct pEG-PRd29A-BnExo317.

[0119] Arabidopsis Col-0 plants were flower-dipped with A. tumefaciens (EHA105) carrying pEG-PRd29A-BnExo317 plasmid. Single-insert transgenic lines were selected based on Southern analysis and confirmed by progeny segregation of subsequent generations on MS medium containing Basta of 10 mg/L. T3 homozygous transgenic lines are being obtained through routine line advancement and will be used for molecular analysis and physiological assessment.

### 9. Over-Expression of GmExo090 in Arabidopsis

### 9.1 Over-Expression of GmExo090 in Arabidopsis Improves Drought Tolerance

[0120] Blast search of AtExo970 protein against soybean (Glycine max) Williams 82 Assembly 1 Annotation 1.1 Protein Sequences (www.soybase.org) retrieved 3 homologs in soybean: Glyma19g11090 (named here as GmExo090, SEQ ID NO:172), Glyma15g02690 (named here as GmExo690, SEQ ID NO:176) and Glyma13g42740 (named here as GmExo740, SEQ ID NO:179). AtExo970 shares an identity of 86%, 70% and 70% with GmExo090, GmExo690 and GmExo740, respectively. The closest homolog GmExo090 has 354 amino acids (aa) while GmExo690 and GmExo740 both have 366 aa. GmExo690 and GmExo740 are paralogue to each other with identity of 94%. They are probably derived from the same ancestor during soybean genome duplication. Thus, only GmExo090 and GmExo740 were representatively used for further studies.

[0121] The nucleotide sequence of cDNA and genomic DNA for GmExo090 (SEQ ID NO:173 SEQ ID NO:175) are 1384 and 2704 nt in length respectively. Primers were designed to target to the 5′ or 3′ UTR region of GmExo090 gene. Soybean cDNA was made by reverse transcription of total RNA from young leaves of cultivar Jack. Primers GmExo090-XhoF2 (SEQ ID NO:49) and GmExo090-XbaR2 (SEQ ID NO:50) were used to amplify the coding sequence of GmExo090 from leaf cDNA.

[0122] GmExo090 cDNA fragment (SEQ ID NO:174) was double digested with XhoI-XbaI and then ligated to pEarleyGate plasmid digested with the same enzymes. This cloning resulted in construct pEG-35S-GmExo090, in which GmExo090 is downstream 35S promoter.

[0123] Arabidopsis Col-0 plants were flower-dipped with A. tumefaciens (EHA105) carrying pEG-35S-GmExo090 plasmid. Single-insert transgenic lines were selected based on Southern analysis and confirmed by progeny segregation of subsequent generations on MS medium containing Basta of 10 mg/L. T3 homozygous transgenic lines were obtained through routine line advancement and were used for molecular analysis. Subsequently, plant growth & development as well as tolerance to drought of 14 lines were evaluated.

[0124] All transgenic lines had bigger biomass at day 0 prior to drought and at day 4 of drought (Table 11), more importantly, their water loss relative to their biomass was significantly reduced comparing to their controls. In addition, most of the transgenic lines also showed higher water use efficiency (WUE) (Table 12). The result suggests that GmExo090 is the functional homolog of AtExo970 in soybean.

TABLE 11
Days to flowering and shoot biomass (DW) at day 0 and day 4 harvest from
transgenic lines of 35S-GmExo090 in comparison of control null and Col
Biomass

| | | Days to | | | | | | | | | |
|---|---|---|---|---|---|---|---|---|---|---|---|
| | | 1st Flower | | Shoot DW (g) - day 0 | | | | Shoot DW (g) - day 4 drought | | | |
| | | | Std | | Std | % | % | | Std | % | % |
| Entry | # Reps | Mean | Err | Mean | Err | Null | Col | Mean | Err | Null | Col |
| 9-3 | 8 | 21.5 | 0.3 | 0.43 | 0.04 | 124% | 123% | 0.75 | 0.03 | 126% | 130% |
| 16-1 | 8 | 21.1 | 0.4 | 0.40 | 0.03 | 117% | 116% | 0.67 | 0.03 | 113% | 116% |
| 20-6 | 8 | 20.9 | 0.4 | 0.39 | 0.04 | 115% | 113% | 0.70 | 0.04 | 118% | 122% |
| 30-2 | 8 | 21.0 | 0.3 | 0.39 | 0.03 | 114% | 113% | 0.67 | 0.04 | 112% | 115% |
| 60-11 | 8 | 21.4 | 0.3 | 0.44 | 0.04 | 128% | 127% | 0.68 | 0.03 | 114% | 117% |
| Null | 8 | 20.3 | 0.3 | 0.34 | 0.03 | — | 97% | 0.59 | 0.03 | — | 102% |
| Col | 8 | 20.3 | 0.3 | 0.35 | 0.02 | 101% | — | 0.58 | 0.02 | 97% | — |

(Bold- significant difference to the null, italics - significant difference to Col).

TABLE 12
Water loss relative to biomass at day 3 and 4, biomass accumulation
and water use efficiency (WUE) for lines of 35S-GmExo090 in
comparison of control null and Col
Day 4 - Drought

| | | Water loss in 3 d/ | | | | Water loss in 4 d/ | | | | Biomass | | WUE (g shoot/ | |
|---|---|---|---|---|---|---|---|---|---|---|---|---|---|
| | | shoot DW-d 4 | | | | shoot DW-d 4 | | | | accumulation | | kg H20) | |
| | | | Std | % | % | | Std | % | % | | % | | % |
| Entry | # Reps | Mean | Err | Null | Col | Mean | Err | Null | Col | Mean | Null | Mean | Null |
| 9-3 | 8 | 110.9 | 2.9 | 77% | 75% | 119.6 | 3.7 | 78% | 76% | 0.32 | 145% | 3.6 | 130% |
| 16-1 | 8 | 125.3 | 4.5 | 87% | 85% | 135.0 | 5.7 | 88% | 86% | 0.27 | 121% | 3.0 | 108% |
| 20-6 | 8 | 116.0 | 6.8 | 81% | 78% | 130.9 | 8.8 | 85% | 83% | 0.31 | 139% | 3.5 | 124% |
| 30-2 | 8 | 129.0 | 6.6 | 90% | 87% | 137.6 | 7.2 | 89% | 88% | 0.28 | 124% | 3.1 | 110% |
| 60-11 | 8 | 124.1 | 5.9 | 86% | 84% | 134.1 | 6.7 | 87% | 85% | 0.24 | 107% | 2.7 | 96% |
| Null | 8 | 144.0 | 5.1 | — | 97% | 153 9 | 6.1 | — | 97% | 0.25 | — | 2.8 | — |
| Col | 8 | 148.1 | 4.5 | 103% | — | 157.2 | 5.2 | 102% | — | 0.23 | 104% | 2.6 | 92% |

(Bold- significant difference to the null, italics - significant difference to Col).

### 9.2 Over-Expression of GmExo090 in Arabidopsis Improves Plant Productivity Under Optimal, N & P Deficiency

[0125] Arabidopsis seeds from the best lines and controls of pEG-35S-GmExo090 (9-3, 16-1, 20-6, 27-1, 54-2, null and Columbia) and pEG-35S-GmExo740 (37-9, 53-6, 66-3, 74-8, null) were direct seeded into 80% agar wells in the hydroponic trays. The trays were covered with saran wrap and placed in the cold (5° C.) for 3 days and then into a 3-tier grow chamber under optimal conditions (22° C.; 18 hr light, ˜200 μE). The trays remained covered for 8 days and then covered with hard covers for an additional week to prevent drying out. During the 1^{st} 2 weeks of growth the trays were maintained in water (week 1) and then optimal Hoagland's (week 2). At 2 weeks out of the cold, the water was replaced with a modified Hoagland's solution for each treatment: optimal, low P (1/100), low N (1/10). Nutrient solution was replaced twice weekly and photographs were taken at the start of the nutrient treatment, 1 week and 2 weeks into the stress. All plants were maintained in the nutrient treatments until 1 week into flowering, at which point each plant was harvested for both shoot and root biomass. Non-destructive growth measurements (#stems, #branches, #pods, #leaves and rosette diameter) were also recorded and individual photographs taken. All statistical analysis was completed using a 2-way ANOVA and significant comparisons were made with Student-T test at 10% level of significance.

[0126] Under optimal condition, all lines had increased shoot and root biomass compared to the controls with statistical significance for more than half of lines. Under the low N (1/10^{th} optimal) condition, there were no significant differences for the shoot biomass, however, all the lines had significantly increased root biomass compared to both the null and Columbia controls by greater than 200%. Similarly, under the low P (1/100^{th}) conditions, all lines had significantly increased root biomass compared to both the null and Columbia, and some lines showed increased shoot biomass.

TABLE 13
Shoot biomass (g) and root biomass (g) for selected transgenic
lines and controls under optimal hydroponic conditions.

| | | Optimal | | | | | | | |
|---|---|---|---|---|---|---|---|---|---|
| | | shoot DW (g) | | | | Root DW (g) | | | |
| | | | Std | % | % | | Std | % | % |
| Entry | # reps | Mean | Err | null | Col | Mean | Err | null | Col |
| 9-3 | 9 | 0.17 | 0.01 | 111% | 107% | 0.024 | 0.002 | 101% | 90% |
| 16-1 | 9 | 0.18 | 0.01 | 120% | 114% | 0.026 | 0.002 | 111% | 99% |
| 20-6 | 9 | 0.17 | 0.01 | 115% | 110% | 0.029 | 0.003 | 124% | 111% |
| 27-1 | 9 | 0.20 | 0.01 | 131% | 125% | 0.029 | 0.002 | 121% | 108% |
| 54-2 | 9 | 0.18 | 0.02 | 122% | 116% | 0.030 | 0.002 | 126% | 113% |
| Null | 9 | 0.15 | 0.01 | — | 96% | 0.024 | 0.002 | — | 89% |
| Col | 9 | 0.16 | 0.01 | 105% | — | 0.027 | 0.002 | 112% | — |

(bold - significant difference to null control, italics - significant difference to Col.

TABLE 14
Shoot biomass (g) and root biomass (g) for selected
transgenic lines and controls under low nitrogen
((1/100^{th} optimal) hydroponic conditions.

| | | Low N (1/10th) | | | | | | | |
|---|---|---|---|---|---|---|---|---|---|
| | | shoot DW (g) | | | | Root DW (g) | | | |
| | | | Std | % | % | | Std | % | % |
| Entry | # reps | Mean | Err | null | Col | Mean | Err | null | Col |
| 9-3 | 8 | 0.062 | 0.003 | 98% | 100% | 0.023 | 0.003 | 231% | 225% |
| 16-1 | 9 | 0.062 | 0.004 | 98% | 100% | 0.025 | 0.002 | 250% | 243% |
| 20-6 | 9 | 0.065 | 0.003 | 103% | 105% | 0.027 | 0.003 | 278% | 271% |
| 27-1 | 9 | 0.065 | 0.003 | 103% | 105% | 0.023 | 0.002 | 238% | 231% |
| 54-2 | 9 | 0.063 | 0.002 | 100% | 102% | 0.029 | 0.003 | 295% | 287% |
| Null | 9 | 0.063 | 0.004 | — | 102% | 0.010 | 0.001 | — | 97% |
| col | 9 | 0.062 | 0:004 | 98% | — | 0.010 | 0.002 | 103% | — |

(bold - significant difference to null control, italics - significant difference to Col.

TABLE 15
Shoot biomass (g) and root biomass (g) for selected transgenic lines and
controls under low phosphorus ((1/100^{th} optimal) hydroponic conditions.

| | | Low P (1/100) | | | | | | | |
|---|---|---|---|---|---|---|---|---|---|
| | | shoot DW (g) | | | | Root DW (g) | | | |
| | | | Std | % | % | | Std | % | % |
| Entry | # reps | Mean | Err | null | Col | Mean | Err | null | Col |
| 9-3 | 9 | 0.050 | 0.004 | 122% | 113% | 0.022 | 0.002 | 244% | 204% |
| 16-1 | 9 | 0.054 | 0.003 | 130% | 121% | 0.024 | 0.003 | 263% | 219% |
| 20-6 | 9 | 0.044 | 0.005 | 106% | 98% | 0.016 | 0.002 | 175% | 146% |
| 27-1 | 8 | 0.055 | 0.005 | 135% | 125% | 0.019 | 0.002 | 203% | 170% |
| 54-2 | 9 | 0.048 | 0.003 | 118% | 109% | 0.019 | 0.001 | 205% | 172% |
| Null | 9 | 0.041 | 0.003 | — | 93% | 0.009 | 0.001 | — | 83% |
| Col | 8 | 0.044 | 0.005 | 108% | — | 0.011 | 0.002 | 120% | — |

(bold - significant difference to null control, italics - significant difference to Col.

### 10. Over-Expression of GmExo740 in Arabidopsis Improves Drought Tolerance and Productivity

[0127] The nucleotide sequence of cDNA and genomic DNA of GmExo740 (SEQ ID NO:180, SEQ ID NO:181) are 1693 and 3759 nt in length respectively. Primers were designed to target to the 5′ or 3′ UTR region of GmExo740 gene. Soybean cDNA was made by reverse transcription of total RNA from young leaves of cultivar Jack. Primers GmExo740-XhoF1 (SEQ ID NO:51) and GmExo740-XbaR1 (SEQ ID NO:52) were used to amplify the coding sequence of GmExo740 from leaf cDNA.

[0128] GmExo740 cDNA fragment was double digested with XhoI-XbaI and then ligated to pEarleyGate plasmid digested with the same enzymes. This cloning resulted in construct pEG-35S-GmExo740, in which GmExo740 cDNA (SEQ ID NO:182) is downstream 35S promoter.

[0129] Arabidopsis Col-0 plants were flower-dipped with A. tumefaciens (EHA105) carrying pEG-35S-GmExo740 plasmid. Single-insert transgenic lines were selected based on Southern analysis and confirmed by progeny segregation of subsequent generations on MS medium containing Basta of 10 mg/L. T3 homozygous transgenic lines were obtained through routine line advancement and were used for molecular analysis. Subsequently, plant growth & development as well as tolerance to drought of 14 lines were evaluated in comparison of the controls including Col parent and segregated nulls.

[0130] Most of the transgenic lines flowered slightly later than the parent and null controls, had increased shoot biomass at day 0 prior to drought, maintained the same trend after 4 days of drought (Table 16). More importantly, these transgenic lines showed reduced water loss relative to their biomass at day 3 and 4 of drought, higher biomass accumulation and better water use efficiency during the stress comparing to the controls (Table 17). These results suggest that GmExo740, similar to GmExo090 is another functional homolog of AtExo970 in soybean.

TABLE 16
Days to flowering and shoot biomass (DW) at day 0
and day 4 of drought for lines of 35S-GmExo740.
Biomass

| | | Days to | | | | | | | | | |
|---|---|---|---|---|---|---|---|---|---|---|---|
| | | 1st Flower | | Shoot DW (g)-Day 0 | | | | Shoot DW (g)-Day 4 drought | | | |
| | | | Std | | Std | % | % | | Std | % | % |
| Entry | # Reps | Mean | Err | Mean | Err | Null | Col | Mean | Err | Null | Col |
| 15-8 | 8 | 20.8 | 0.5 | 0.65 | 0.04 | 105% | 125% | 0.84 | 0.03 | 106% | 118% |
| 37-9 | 8 | 21.1 | 0.2 | 0.64 | 0.02 | 103% | 123% | 0.83 | 0.05 | 106% | 117% |
| 53-6 | 8 | 21.5 | 0.4 | 0.70 | 0.03 | 113% | 135% | 0.89 | 0.03 | 113% | 126% |
| 57-1 | 8 | 21.3 | 0.3 | 0.72 | 0.03 | 116% | 140% | 0.85 | 0.03 | 108% | 120% |
| 66-3 | 8 | 21.1 | 0.5 | 0.69 | 0.04 | 111% | 133% | 0.89 | 0.03 | 113% | 126% |
| 74-8 | 8 | 20.6 | 0.3 | 0.59 | 0.03 | 95% | 115% | 0.89 | 0.04 | 113% | 126% |
| Null | 8 | 20.8 | 0.3 | 0.62 | 0.03 | — | 120% | 0.79 | 0.05 | — | 111% |
| Col | 8 | 19.5 | 0.3 | 0:52 | 0.03 | 84% | — | 0.71 | 0 04 | 90% | — |

(Bold- significant difference to null, italics - significant difference to Col).

TABLE 17
Water lost relative to biomass at day 3 and 4, biomass accumulation
and water use efficiency (WUE) for lines of 35S-GmExo740.
Drought

| | | Water lost in 3 d/ | | | | Water lost in 4 d/ | | | | Biomass | | WUE (g shoot/ | |
|---|---|---|---|---|---|---|---|---|---|---|---|---|---|
| | | shoot DW-d 4 | | | | shoot DW-d 4 | | | | accumulation | | kg H20) | |
| | # | | Std | % | % | | Std | % | % | | % | | % |
| Entry | Reps | Mean | Err | Null | Col | Mean | Err | Null | Col | Mean | Null | Mean | Null |
| 15-8 | 8 | 105.2 | 3.7 | 96% | 85% | 110.0 | 4.0 | 96% | 84% | 0.19 | 110% | 9.17 | 104% |
| 37-9 | 7 | 101.2 | 2.8 | 93% | 82% | 105.9 | 2.9 | 92% | 81% | 0.19 | 110% | 9.06 | 103% |
| 53-6 | 8 | 98.6 | 2.5 | 90% | 80% | 103.2 | 2.8 | 90% | 79% | 0.19 | 111% | 9.75 | 110% |
| 57-1 | 8 | 104.1 | 3.8 | 95% | 84% | 108.6 | 4.0 | 95% | 83% | 0.13 | 74% | 9.30 | 105% |
| 66-3 | 8 | 99.3 | 3.3 | 91% | 81% | 103.5 | 3.6 | 90% | 79% | 0.20 | 117% | 9.74 | 110% |
| 74-8 | 8 | 99.3 | 4.2 | 91% | 81% | 104.0 | 4.3 | 91% | 80% | 0.29 | 170% | 9.73 | 110% |
| Null | 8 | 109.0 | 6.4 | — | 88% | 114.4 | 6.7 | — | 88% | 0.17 | — | 8.64 | — |
| col | 7 | 123.3 | 6.4 | 113% | — | 130.4 | 7.2 | 114% | — | 0.19 | 110% | 7.84 | 89% |

(Bold- significant difference to own null, italics - significant difference to Col).

### 11. Over-Expression of ZmExo846 in Arabidopsis

### 11.1. Over-Expression of ZmExo846 in Arabidopsis Improves Drought Tolerance

[0131] Blast search of AtExo970 protein against corn (Zea may) B73 FGS Translations 5b.60 for RefGen_v2 (www.maizegdb.org) found 2 homologs in B73: GRMZM2G127846 (named here as ZmExo846, SEQ ID NO:183) and GRMZM2G079807 (named here as ZmExo807, SEQ ID NO:186). ZmExo846 and ZmExo807 share an identity of 80% and 73% with AtExo970 respectively. ZmExo846, the closer homolog, has 336 aa while ZmExo807 has 350 aa. The nucleotide sequence of cDNA and genomic DNA for ZmExo846 and ZmExo807 are listed as SEQ ID NO:184, SEQ ID NO:185, SEQ ID NO:187, SEQ ID NO:188 respectively.

[0132] Corn seeds of variety F507 were germinated in liquid medium in Magenta box for 10 days. Leaf and root tissue were collected for RNA and genomic DNA preparation. Corn cDNA was made by reverse transcription of total RNA from young leaves. Primers were designed to target to 5′ or 3′ UTR region of ZmExo846 gene. Primer ZmExo846-XhoF1 (SEQ ID NO:53) and ZmExo846-XbaR1 (SEQ ID NO:55) were used to amplify ZmExo846 gene from leaf genomic DNA.

[0133] ZmExo846 gDNA fragment was double digested with XhoI-XbaI and then ligated to pEarleyGate plasmid digested with the same enzymes. This cloning resulted in construct pEG-35S-gZmExo846, in which ZmExo846 gDNA (SEQ ID NO:185) is downstream 35S promoter.

[0134] Arabidopsis Col-0 plants were flower-dipped with A. tumefaciens (EHA105) carrying pEG-35S-gZmExo846 plasmid. Single-insert transgenic lines were selected based on Southern analysis and confirmed by progeny segregation of subsequent generations on MS medium containing Basta of 10 mg/L. T3 homozygous transgenic lines were obtained through routine line advancement and were used for molecular analysis. Subsequently, plant growth & development as well as tolerance to drought of 14 lines were evaluated in comparison of the controls including Col parent and segregated nulls.

[0135] Most of the transgenic lines flowered slightly later than the parent and null controls, had increased shoot biomass at day 0 prior to drought, maintained the same trend after 4 days of drought (Table 18). More importantly, these transgenic lines showed reduced water loss relative to their biomass at day 3 and 4 of drought, higher biomass accumulation and better water use efficiency during the stress comparing to the controls (Table 19). These results suggest that ZmExo846 is a functional homolog of AtExo970 in corn.

TABLE 18
Days to flowering and shoot biomass (DW) at day 0
and day 4 of drought for lines of 35S-gZmExo846.
Biomass

| | | Days to | | | | | | | | | |
|---|---|---|---|---|---|---|---|---|---|---|---|
| | | 1st Flower | | Shoot DW (g) - Day 0 | | | | Shoot DW (g) - day 4 drought | | | |
| | | | Std | | Std | % | % | | Std | % | % |
| Entry | # Reps | Mean | Err | Mean | Err | Null | Col | Mean | Err | Null | Col |
| 10-10 | 8 | 18.0 | 0.4 | 0.649 | 0.035 | 112% | 113% | 1.003 | 0.034 | 122% | 115% |
| 17-9 | 8 | 19.3 | 0.3 | 0.782 | 0.017 | 134% | 136% | 1.078 | 0.036 | 131% | 123% |
| 18-3 | 8 | 17.5 | 0.3 | 0.623 | 0.029 | 107% | 108% | 0.990 | 0.048 | 120% | 113% |
| 20-1 | 8 | 17.6 | 0.3 | 0.620 | 0.023 | 107% | 108% | 0.991 | 0.033 | 120% | 113% |
| 78-3 | 8 | 18.8 | 0.3 | 0.725 | 0.033 | 125% | 126% | 1.027 | 0.025 | 125% | 118% |
| 82-7 | 8 | 17.0 | 0.3 | 0.586 | 0.024 | 101% | 102% | 0.958 | 0.053 | 116% | 110% |
| Null | 8 | 16.8 | 0.3 | 0.581 | 0.030 | — | 101% | 0.824 | 0.030 | — | 94% |
| Col | 8 | 16.8 | 0.3 | 0.574 | 0.020 | 99% | — | 0.873 | 0.035 | 104% | — |

(Bold- significant difference to the null, italics - significant difference to Col).

TABLE 19
Water loss relative to biomass at day 3 and 4 of drought, biomass accumulation
and water use efficiency (WUE) for lines of 35S-gZmExo846.
Water loss

| | | Water loss in 3 d/ | | | | Water loss in 4 d/ | | | | Biomass | | WUE (g shoot/ | |
|---|---|---|---|---|---|---|---|---|---|---|---|---|---|
| | | shoot DW-d 4 | | | | shoot DW-d 4 | | | | accumulation | | kg H20) | |
| | | | Std | % | % | | Std | % | % | | % | | % |
| Entry | # Reps | Mean | Err | Null | Col | Mean | Err | Null | Col | Mean | Null | Mean | Null |
| 10-10 | 8 | 80.6 | 1.8 | 83% | 86% | 86.8 | 2.3 | 82% | 87% | 0.35 | 146% | 4.09 | 145% |
| 17-9 | 8 | 76.9 | 2.2 | 79% | 82% | 82.0 | 2.5 | 78% | 82% | 0.30 | 125% | 3.38 | 120% |
| 18-3 | 8 | 83.8 | 3.5 | 86% | 90% | 89.8 | 4.1 | 85% | 89% | 0.37 | 154% | 4.19 | 149% |
| 20-1 | 8 | 81.7 | 1.7 | 84% | 87% | 88.2 | 2.6 | 83% | 88% | 0.37 | 154% | 4.27 | 151% |
| 78-3 | 8 | 80.0 | 1.5 | 82% | 86% | 85.4 | 1.9 | 81% | 85% | 0.30 | 125% | 3.46 | 123% |
| 82-7 | 8 | 85.2 | 3.5 | 87% | 91% | 92.5 | 4.7 | 88% | 92% | 0.37 | 154% | 4.28 | 152% |
| Null | 8 | 97.6 | 3.0 | 100% | 104% | 105.7 | 3.6 | — | 105% | 0.24 | — | 2.82 | — |
| Col | 8 | 93.4 | 3.2 | 97% | 100% | 100.4 | 3.8 | 96% | — | 0.30 | 115% | 3.45 | 115% |

(Bold- significant difference to own null, italics - significant difference to Col).

### 11.2. Over-Expression of ZmExo846 in Arabidopsis Improves Plant Productivity Under Optimal, and Low N & P Conditions

[0136] Arabidopsis seeds from the best lines and controls of pEG-35S-BnExo317 (24-12, 26-12, 48-7, 50-5, 80-5, null) and pEG-35S-gZmExo846 (6-7, 10-10, 17-9, 34-6, null, Columbia) were direct seeded into 0.8% agar wells in the hydroponic trays. The trays were covered with saran wrap and placed in the cold (5° C.) for 3 days and then into a 3-tier grow chamber under optimal conditions (22° C.; 18 hr light, ˜200 μE). The trays remained covered for 8 days and then covered with hard covers for an additional week to prevent drying out. The water was replaced twice during the first week and then replaced with optimal solution for all trays for one week. At 2 weeks out of the cold, the water was replaced with a modified Hoagland's solution for each treatment: optimal, low P (1/100), low N (1/10). Nutrient solution was replaced twice weekly and photographs were taken at the start of the nutrient treatment, 1 week and 2 weeks into the stress. All plants were maintained in the nutrient treatments until 1 week into flowering, at which point each plant was harvested for both shoot and root biomass. Non-destructive growth measurements (#stems, #branches, #pods, #leaves and rosette diameter) were also recorded and individual photographs taken. All statistical analysis was completed using a 2-way ANOVA and significant comparisons were made with Student-T test at 10% level of significance.

[0137] Under optimal conditions, all lines had significantly increased shoot and root biomass compared to both the null and Columbia (Table 20). In the low nitrogen (1/10th) treatment, all lines had increased shoot biomass compared to both the null and Columbia with significant difference for 1 line, however, all lines had significantly increased root biomass compared to both controls (Table 21). In the low phosphorus (1/100th) treatment, all the lines had increased shoot biomass compared to both the null and Columbia with significant difference for most of the lines, and all lines had significantly increased root biomass compared to both controls (Table 22).

TABLE 20
Shoot biomass (g) and root biomass (g) for selected transgenic
lines and controls under optimal hydroponic conditions.

| | | Optimal | | | | | | | |
|---|---|---|---|---|---|---|---|---|---|
| | | shoot DW (g) | | | | Root DW (g) | | | |
| Entry | # reps | Mean | Std Err | % null | % col | Mean | Std Err | % null | % col |
| 6-7 | 8 | 0.289 | 0.026 | 157% | 142% | 0.030 | 0.003 | 211% | 143% |
| 10-10 | 9 | 0.289 | 0.010 | 157% | 142% | 0.027 | 0.002 | 194% | 131% |
| 17-9 | 9 | 0.284 | 0.022 | 154% | 140% | 0.029 | 0.002 | 210% | 142% |
| 34-6 | 7 | 0.270 | 0.017 | 147% | 133% | 0.026 | 0.002 | 185% | 125% |
| Null | 9 | 0.184 | 0.022 | — | 90% | 0.014 | 0.002 | — | 68% |
| Col | 9 | 0.203 | 0.014 | 111% | — | 0.021 | 0.002 | 148% | — |

(bold - significant difference to null control, italics - significant difference to Col.

TABLE 21
Shoot biomass (g) and root biomass (g) for selected transgenic lines and
controls under low nitrogen ((1/100^{th} optimal) hydroponic conditions.

| | | Low N (1/10th) | | | | | | | |
|---|---|---|---|---|---|---|---|---|---|
| | | shoot DW (g) | | | | Root DW (g) | | | |
| Entry | # reps | Mean | Std Err | % null | % col | Mean | Std Err | % null | % col |
| 6-7 | 9 | 0.088 | 0.008 | 111% | 135% | 0.020 | 0.003 | 181% | 191% |
| 10-10 | 9 | 0.100 | 0.008 | 127% | 155% | 0.028 | 0.003 | 245% | 259% |
| 17-9 | 9 | 0.093 | 0.007 | 119% | 144% | 0.021 | 0.004 | 184% | 194% |
| 34-6 | 6 | 0.089 | 0.010 | 113% | 137% | 0.027 | 0.004 | 242% | 256% |
| Null | 8 | 0.079 | 0.005 | — | 121% | 0.011 | 0.001 | — | 106% |
| col | 9 | 0.065 | 0.004 | 82% | — | 0.011 | 0.002 | 95% | — |

(bold - significant difference to null control, italics - significant difference to Col.

TABLE 22
Shoot biomass (g) and root biomass (g) for selected transgenic lines and
controls under low phosphorus ((1/100th optimal) hydroponic conditions.

| | | Low P (1/100th) | | | | | | | |
|---|---|---|---|---|---|---|---|---|---|
| | | shoot DW (g) | | | | Root DW (g) | | | |
| Entry | # reps | Mean | Std Err | % null | % col | Mean | Std Err | % null | % col |
| 6-7 | 9 | 0.103 | 0.010 | 125% | 163% | 0.026 | 0.004 | 343% | 304% |
| 10-10 | 9 | 0.129 | 0.009 | 156% | 203% | 0.032 | 0.004 | 416% | 369% |
| 17-9 | 9 | 0.116 | 0.010 | 141% | 183% | 0.017 | 0.002 | 218% | 193% |
| 34-6 | 6 | 0.101 | 0.015 | 122% | 158% | 0.019 | 0.001 | 252% | 223% |
| Null | 9 | 0.083 | 0.007 | — | 130% | 0.008 | 0.001 | — | 89% |
| Col | 8 | 0.063 | 0.007 | 77% | — | 0.009 | 0.001 | 113% | — |

(bold - significant difference to null control, italics - significant difference to Col.

### 12. Over-Expression of TaExo220 in Arabidopsis

[0138] By Blasting AtExo970 protein against NCBI Wheat (Triticum aestivum) Non-redundant Protein Sequences (https://blast.ncbi.nlm.nih.gov/) and referring to Wheat JBrowse in International Wheat Genome Consortium (http://www.wheatgenome.org), several wheat homologs were identified from different wheat cultivars. Based on sequence similarity and integrity, 3 homologs from Chinese spring wheat were identified. They are TraesCS6B01G302200 (named here as TaExo220, SEQ ID NO:193), TraesCS4B01G319600 (named here as TaExo960, SEQ ID NO:199) and AK334506 (named here as TaExo506, SEQ ID NO:202).

[0139] TaExo220, TaExo960 and TaExo506 share an identity of 82%, 70% and 66% with AtExo970 respectively. TaExo220, the closest homolog, has 335 aa while TaExo960 and TaExo506 have 354 and 334 aa respectively. The nucleotide sequence of cDNA and genomic DNA for TaExo220 and TaExo960 are listed as SEQ ID NO:194, SEQ ID NO:195, SEQ ID NO:200 and SEQ ID NO:201 respectively. The cDNA sequence of TaExo506 is listed as SEQ ID NO:203.

[0140] Wheat seeds of variety Fielder 17 were germinated in liquid medium in Magenta box for 10 days. Leaf and stem tissue were collected for RNA and genomic DNA preparation. Wheat cDNA was made by reverse transcription of total RNA from young seedlings. Primers were designed to target to 5′ or 3′ UTR region of TaExo220 gene. Primer TaExo220-BglF1 (SEQ ID NO:60) and TaExo220-XbaR1 (SEQ ID NO:62) were used to amplify TaExo220 gene from leaf genomic DNA.

[0141] TaExo220 gDNA fragment was double digested with BgIII-XbaI and then ligated to pEarleyGate plasmid digested with BamHI and XbaI enzymes. This cloning resulted in construct pEG-35S-TaExo220, in which TaExo220 gDNA (SEQ ID NO:196) is downstream 35S promoter.

[0142] Sequencing of the cloned TaExo220 gDNA (SEQ ID NO:196) showed that TaExo220 from winter wheat Fielder 17 is slightly different from TaExo220 from Chinese spring wheat (95% identity, SEQ ID NO:195). TaExo220 cDNA sequence (SEQ ID NO:198) was then assembled from the genomic DNA sequence by removing 6 predicted introns. TaExo220-Fielder protein (SEQ ID NO:197) translated from the cDNA shares an identity of 99% with that from Chinese spring wheat. It was interesting to note that an alternative intron splicing may occur at first intron, which resulted in the 6 amino acid deletion.

[0143] Arabidopsis Col-0 plants were flower-dipped with A. tumefaciens (EHA105) carrying pEG-35S-TaExo220 plasmid. Single-insert transgenic lines were selected based on Southern analysis and confirmed by progeny segregation of subsequent generations on MS medium containing Basta of 10 mg/L. T3 homozygous transgenic lines were obtained through routine line advancement and were used for molecular analysis. Subsequently, plant growth, development and productivity as well as tolerance to drought and N & P deficiency of the transgenic lines are being evaluated in comparison of the controls including wild type and segregated nulls.

### 13. Over-Expression of BdExo960 in Arabidopsis

[0144] Blast search of AtExo970 protein against Brachypodium distachyon v3.1 proteome (https://phytozome.jgi.doe.gov) found 1 homolog in B. distachyon: Bradi3G52960 (named here as BdExo960, SEQ ID NO:189). BdExo960 shares an identity of 69% with AtExo970, which consists of 336 aa. The nucleotide sequence of cDNA and genomic DNA for BdExo960 is listed as SEQ ID NO:190, SEQ ID NO:191 respectively.

[0145] Primer BdExo960-XhoF1 (SEQ ID NO:56) and BdExo960-XbaR1 (SEQ ID NO:58) were designed to target to 5′ or 3′ UTR region of BdExo960 gene. B. distachyon cDNA was made by reverse transcription of total RNA from young leaves of Bd21. The 2 primers were used to amplify the coding sequence of BdExo960 from leaf cDNA.

[0146] BdExo960 cDNA fragment was double digested with XhoI-XbaI and then ligated to pEarleyGate plasmid digested with the same enzymes. This cloning resulted in construct pEG-35S-BdExo960, in which BdExo960 cDNA (SEQ ID NO:190) is downstream 35S promoter.

[0147] Arabidopsis Col-0 plants were flower-dipped with A. tumefaciens (EHA105) carrying pEG-35S-BdExo960 plasmid. Single-insert transgenic lines were selected based on Southern analysis and confirmed by progeny segregation of subsequent generations on MS medium containing Basta of 10 mg/L. T3 homozygous transgenic lines were obtained through routine line advancement and were used for molecular analysis. Subsequently, plant growth, development and productivity as well as tolerance to drought and N & P deficiency of the transgenic lines are being evaluated in comparison of the controls including wild type and segregated nulls.

14. Over-Expression of BdExo960 in Monocot Model Plant Brachypodium distachyon

[0148] Monocot model species Brachypodium distachyon (cultivar Bd21) was used for evaluation of over-expression of AtExo970 homologs from monocot species.

[0149] Brachypodium has 1 homolog of AtExo970 in its genome as described in Section 13. Two more primers (BdExo960-XbaF1, SEQ ID NO:57 and BdExo960-BglR1, SEQ ID NO:59) were designed to target to 5′ or 3′ UTR region of BdExo960 gene. The 2 primers were used to amplify BdExo960 coding sequence from leaf cDNA. cDNA fragment of BdExo960 was double digested with XbaI and BgIII enzymes and then ligated to pB1500-35S-GUS digested with XbaI and BamHI enzymes. This cloning resulted in construct pBl500-35S-BdExo960, in which BdExo960 cDNA (SEQ ID NO:192) is downstream 35S promoter. pB1500-35S-GUS binary vector contains BdGOS2 promoter-driven NPTII gene for Kanamycin or Paramomycin selection, which have been proven to be efficient for Brachypodium transformation.

[0150] Embryogenic calluse prepared from Brachypodium immature seeds (Bd21) were infected with A. tumefaciens (AGL1) carrying pBl500-35S-BdExo960 plasmid (Vogel et al., 2006). TO shoots were regenerated from paromycin-resistant callus on CIM medium. Homozygous single-copy T3 lines were selected based on Southern blot and progeny segregation on MS medium containing kanamycin of 50 mg/L. Subsequently, plant growth, development and productivity as well as tolerance to drought and N & P deficiency of the transgenic lines are being evaluated in comparison of the controls including wild type and segregated nulls.

### 15. Over-Expression of ZmExo846, OsExo920 or TaExo220 in Brachypodium

### 15.1 Over-Expression of ZmExo846 in Brachypodium

[0151] Maize has 2 homologs of AtExo970 as described in Section 11.1. They are ZmExo846 (SEQ ID NO:183) and ZmExo807 (SEQ ID NO:186). The closer homolog is ZmExo846 (SEQ ID NO:183) which share an identity of 80% with AtExo970. Two primers (ZmExo846-XbaF1, SEQ ID NO:482 and ZmExo846-BglR1, SEQ ID NO:483) were designed to target to 5′ or 3′ UTR region of ZmExo846 gene. The 2 primers were used to amplify ZmExo846 gene from leaf genomic DNA as described in Section 11.1.

[0152] Genomic DNA fragment of ZmExo846 (SEQ ID NO:185) was double digested with XbaI and BgIII enzymes and then ligated to pB1500-35S-GUS digested with XbaI and BamHI enzymes. This cloning resulted in construct pB1500-35S-gZmExo846, in which ZmExo846 gDNA (SEQ ID NO:185) is downstream 35S promoter.

[0153] Embryogenic calluse prepared from Brachypodium immature seeds (Bd21) were infected with A. tumefaciens (AGL1) carrying pB1500-35S-gZmExo846 plasmid (Vogel et al., 2006). TO shoots were regenerated from paromomycin-resistant callus on CIM medium. Homozygous single-copy T3 lines were selected based on Southern blot and progeny segregation on MS medium containing kanamycin of 50 mg/L. Subsequently, plant growth, development and productivity as well as tolerance to drought and N & P deficiency of the transgenic lines are being evaluated in comparison of the controls including wild type and segregated nulls.

### 15.2. Over-Expression of OsExo920 in Brachypodium

[0154] By Blasting AtExo970 protein against rice (Oryza sativa) v7_JGI proteome in Phytozome (https://phytozome.jgi.doe.gov/), 2 rice homologs were identified: Os02g47920 (Renamed as OsExo920, SEQ ID NO:204) and Os01g01770 (Renamed as OsExo770, SEQ ID NO:207), which were both annotated as C2H2 zinc finger protein. OsExo920 and OsExo770 have 336 and 334 amino acids respectively, which are 21 or 23 amino acids shorter than AtExo970. The sequences missing in rice homologs lie right in H-NOX domain, which is presumably involved in nitric oxide (NO) signalling.

[0155] OsExo920 and OsExo770 have a protein sequence of 80% and 69% identical to AtExo970 respectively. The nucleotide sequence of cDNA and genomic DNA for OsExo920 and OsExo770 are listed as SEQ ID NO:205, SEQ ID NO:206, SEQ ID NO:208 and SEQ ID NO:209 respectively.

[0156] Primer OsExo920-XbaF1 (SEQ ID NO:66) and OsExo920-XmaR1 (SEQ ID NO:67) were designed to target to 5′ or 3′ UTR region of OsExo920 gene. These 2 primers were used to amplify OsExo920 gene from rice genomic DNA.

[0157] Genomic DNA fragment of OsExo920 (SEQ ID NO:206) was double digested with XbaI and XmaI enzymes and then ligated to pB1500-35S-GUS, which has previously been linearized to have a filled-BamHI blunt end and a sticky XbaI end. This cloning resulted in construct pBl500-35S-OsExo920, in which OsExo920 gDNA (SEQ ID NO:206) is downstream 35S promoter.

[0158] Embryogenic calluse prepared from Brachypodium immature seeds (Bd21) were infected with A. tumefaciens (AGL1) carrying pBl500-35S-OsExo920 plasmid (Vogel et al., 2006). TO shoots were regenerated from paromomycin-resistant callus on CIM medium. Homozygous single-copy T3 lines were selected based on Southern blot and progeny segregation on MS medium containing kanamycin of 50 mg/L. Subsequently, plant growth, development and productivity as well as tolerance to drought and N & P deficiency of the transgenic lines are being evaluated in comparison of the controls including wild type and segregated nulls.

### 15.3. Over-Expression of TaExo220 in Brachypodium

[0159] Wheat has 3 homologs of AtExo970 as described in Section 12.0. They are TaExo220 (SEQ ID NO:193), TaExo960 (SEQ ID NO:199) and TaExo506 (SEQ ID NO:202). The closest homolog is TaExo220 (SEQ ID NO:193) which share an identity of 82% with AtExo970. Two primers (TaExo220-XbaF1, SEQ ID NO:61 and TaExo220-BglR1, SEQ ID NO:63) were designed to target to 5′ or 3′ UTR region of TaExo220 gene. The 2 primers were used to amplify TaExo220 gene from leaf genomic DNA.

[0160] Genomic DNA fragment of TaExo220 (SEQ ID NO:196) was double digested with XbaI and BgIII enzymes and then ligated to pB1500-35S-GUS digested with XbaI and BamHI enzymes. This cloning resulted in construct pB1500-35S-TaExo220, in which TaExo220 gDNA (SEQ ID NO:196) is downstream 35S promoter.

[0161] Embryogenic calluse prepared from Brachypodium immature seeds (Bd21) were infected with A. tumefaciens (AGL1) carrying pB1500-35S-TaExo220 plasmid (Vogel et al., 2006). TO shoots were regenerated from kanamycin-resistant callus on CIM medium. Homozygous single-copy T3 lines were selected based on Southern blot and progeny segregation on MS medium containing kanamycin of 50 mg/L. Subsequently, plant growth, development and productivity as well as tolerance to drought and N & P deficiency of the transgenic lines are being evaluated in comparison of the controls including wild type and segregated nulls.

### 16. Over-Expression of BdExo960, ZmExo846 or TaExo220 Improves Productivity and Drought Tolerance in Brachypodium

[0162] Drought-T1 Brachypodium transgenic seeds for selected lines from 35S-BdExo960, 35S-gZmExo846 and 35S-TaExo220 and the parent control were direct seeded into pre-weighed 3″ pots and placed into the cold for a 2-week vernalization period. The plants were then placed into a grow chamber under optimal conditions (22° C.; 18 h light; ˜300 μE). A total of 20 pots per entry were seeded with 2 seeds per pot. Early into growth, each plant was sampled for PCR and based on the PCR results positive and negative replicates for each entry were selected to create segregated nulls for each line. At 4 days into spiking each plant was watered up to the same weight, covered with aluminum foil, weighed daily for 6 consecutive days, and then harvested for shoot biomass. The data collected are calculated to determine overall biomass under drought stress and water loss relative to biomass for the transgenic lines compared to the controls. All statistical analysis was completed using a 2-way ANOVA and significant comparisons were made with Student-T test at 10% level of significance.

[0163] The transgenic lines showed a gentle trend of flowering later than the segregated null controls, however it is not statistically significant, and most lines also had increased shoot biomass at drought (Table 23 and 25). More importantly, they showed statistically significantly reduced water loss relative to their biomass at day 4, 5 and 6 of drought (Table 24 and 26). These results suggest that the homologs of AtExo970 from monocots, such as BdExo960 and ZmExo846, are functional orthologs of AtExo970, and the similar mechanism involving these genes operates in both dicot and monocot plant species, that can be regulated to enhance plant tolerance to drought by improving their expression level in all plant species.

TABLE 23
Days to flowering and shoot biomass (DW)
of drought for lines of 35S-BdExo960
35S-BdExo960

| | | Days to Flower | | Shoot DW (g) | | |
|---|---|---|---|---|---|---|
| Entry | Rep# | Mean | Std Err | Mean | Std Err | % Ctrl |
| 116b-1 | 10 | 25.1 | 0.4 | 0.56 | 0.03 | 140% |
| 116C-2a | 8 | 23.9 | 0.5 | 0.50 | 0.03 | 126% |
| 9-1a | 9 | 24.7 | 0.6 | 0.48 | 0.03 | 120% |
| 116B-2a | 10 | 22.7 | 0.4 | 0.43 | 0.03 | 109% |
| 116b-3 | 11 | 21.4 | 0.5 | 0.38 | 0.02 | 96% |
| Control | 36 | 23.4 | 0.7 | 0.40 | 0.03 | — |

(Bold- significant different comparing to own segregated null.

TABLE 24
Water loss relative to biomass at day 4, 5 and 6 of drought,
biomass accumulation for lines of 35S-BdExo960

| | | Water lost in 4 d/ | | | Water lost in 5 d/ | | | Water lost in 6 d/ | | |
|---|---|---|---|---|---|---|---|---|---|---|
| | | shoot DW - d 6 | | | shoot DW - d 6 | | | shoot DW -d 6 | | |
| | | | Std | % | | Std | % | | Std | % |
| Entry | Rep# | Mean | Err | Ctrl | Mean | Err | Ctrl | Mean | Err | Ctrl |
| 116b-1 | 10 | 77.32 | 2.52 | 82% | 83.64 | 3.57 | 79% | 88.02 | 4.42 | 76% |
| 116C-2a | 8 | 81.95 | 5.36 | 87% | 90.66 | 5.77 | 85% | 96.11 | 6.11 | 83% |
| 9-1a | 9 | 82.93 | 3.41 | 88% | 92.39 | 3.66 | 87% | 98.57 | 4.08 | 85% |
| 116B-2a | 10 | 81.89 | 3.49 | 87% | 93.89 | 3.64 | 88% | 101.96 | 4.20 | 88% |
| 116b-3 | 11 | 87.24 | 3.29 | 93% | 100.71 | 3.97 | 95% | 111.44 | 4.71 | 96% |
| Control | 36 | 93.78 | 5.44 | — | 106.15 | 6.62 | — | 115.51 | 8.03 | — |

(Bold- significant different comparing to own segregated null, italics - significant difference to Col).

TABLE 25
Days to flowering and shoot biomass (DW) of
drought for lines of 35S-gZmExo846.
35S-gZmExo846

| | | Days to flower | | Shoot DW (g) | | |
|---|---|---|---|---|---|---|
| Entry | Rep# | Mean | Std Err | Mean | Std Err | % Ctrl |
| 4-2b | 7 | 25.9 | 0.5 | 0.49 | 0.02 | 127% |
| 4-6a | 5 | 25.2 | 0.5 | 0.49 | 0.02 | 126% |
| 8-1a | 10 | 24.5 | 0.8 | 0.46 | 0.04 | 119% |
| 4-4a | 10 | 23.2 | 0.4 | 0.40 | 0.03 | 104% |
| Control | 16 | 23.3 | 0.3 | 0.41 | 0.03 | — |

(Bold- significant different comparing to own segregated null).

TABLE 26
Water loss relative to biomass at day 4, 5 and
6 of drought for lines of 35S-gZmExo846.

| | | Water lost in 4 d/ | | | Water lost in 5 d/ | | | Water lost in 6 d/ | | |
|---|---|---|---|---|---|---|---|---|---|---|
| | | shoot DW - d 6 | | | shoot DW -d 6 | | | shoot DW -d 6 | | |
| | | | Std | % | | Std | % | | Std | % |
| Entry | Rep# | Mean | Err | Ctrl | Mean | Err | Ctrl | Mean | Err | Ctrl |
| 4-2b | 7 | 79.29 | 3.89 | 84% | 88.66 | 3.77 | 82% | 94.70 | 3.82 | 81% |
| 4-6a | 5 | 81.27 | 4.34 | 86% | 90.16 | 4.10 | 84% | 95.71 | 4.23 | 82% |
| 8-1a | 10 | 87.08 | 3.51 | 93% | 95.73 | 4.60 | 89% | 102.19 | 5.79 | 87% |
| 4-4a | 10 | 79.45 | 3.80 | 84% | 92.11 | 4.70 | 86% | 101.18 | 5.64 | 86% |
| Control | 16 | 85.00 | 3.52 | — | 96.18 | 2.72 | — | 105.36 | 2.11 | — |

(Bold- significant difference to own segregated null).

[0164] Low Nutrient Root Assessment—T1 Brachypodium transgenic seeds for selected lines from 35S-BdExo960, 35S-gZmExo846 and 35S-TaExo220 and the parent control were plated onto large plates with MS media. The plates were placed into the cold for a 7-day vernalization period and then into a grow chamber under optimal conditions (22° C.; 18 h light; ˜300 μE). A total of 40 seeds for each entry were plated. As soon as possible each seedling was sampled for PCR and based on the PCR results both positive and negative seedlings were selected and transplanted into seed germination pouches with various nutrient solutions made with a modified Hoagland's recipe. A total of 8 positives per entry for each of the following treatments: optimal, low nitrogen, low phosphorus were transplanted. Two pooled nulls were also transplanted using PCR negative seedlings. Each seed pouch was saturated at the start with the appropriate nutrient solution and maintained with each solution for 3 weeks of growth, at which point each seedling was harvested for shoot and root biomass. This study is currently in progress. All statistical analysis was completed using a 2-way ANOVA and significant comparisons were made with Student-T test at 10% level of significance.

### 17. Over-Expression of GmExo090, GmExo740 or AtExo970 Using Constitutive Promoter as Well as Conditional Promoters in Soybean

[0165] The promising results of overexpressing AtExo970 and its orthologs including GmExo090 and GmExo740 in Arabidopsis suggest that the effect is universal among various plant species. Thus, Agrobacterium tumefaciens (EHA105) carrying pEG-35S-GmExo090 in Section 9, pEG-35S-GmExo740 Section 10 and pEG-35S-gAtExo970 in Section 6.1 were used for transformation in soybean. Overexpression of these genes under conditional promoters such as drought inducible and root specific were also evaluated in soybean. 17.1. Agrobacterium-mediated soybean transformation Soybean cv. Jack and A. tumefaciens strain EHA105 were used for soybean transformation. EHA105 cells were transformed to carry either of the binary plasmids of pEG-35S-GmExo090, pEG-35S-GmExo740 or pEG-35S-gAtExo970.

[0166] Cotyledon node (CN) explants prepared from germinating seeds were immerged in Agro infection medium (AIM) for 30 min, followed by cultivation on co-cultivation medium (CCM) for 3 days. After shoots induction on shoot induction medium (SIM) for 3 weeks, explants were transferred to shoot elongation medium (SEM) under Basta selection (6 mg/L) till to the formation of Basta-resistant young shoots.

[0167] T0 transformants were confirmed by Basta painting by applying 40 ul of 100 mg/L glufosinate onto newly opened young leaflets. The integrity of all transgenes was confirmed by PCRs specific to each element in T-DNA. Transgene copy number was determined by Southern-blotting by probing on GFR sequence. Homozygous single-copy transgenic lines are being evaluated in comparison of controls including wild type Jack and segregated nulls for plant growth, development and productivity as well as tolerance to drought and N & P deficiency.

### 17.2. Over-Expression of GmExo090 in Soybean Improves Plant Productivity Under Optimal, Drought and Low N & P Conditions

[0168] Drought-Soybean seeds of the homozygous lines of 35S-GmExo090 and parent controls were direct seeded into pre-weighed 4″ deep pots in a growth chamber under optimal conditions (22° C.; 14 hr light, ˜500 μE). The experiment used a complete random block design with 8 replicates per entry in each of 3 treatments: day 0 harvest, day 4 drought and day 6 drought, which started 5 days after first open flower. Plants in the day 0 group were harvested for shoot biomass and drought plants were watered up to saturation, covered with aluminum foil and weighed daily for 4 or 6 consecutive days before being harvested for shoot biomass. statistical analysis was completed using a 2-way ANOVA and significant comparisons were made with a Student's T at 10% level of significance.

[0169] Most of the transgenic lines showed increased shoot biomass under optimal condition and the shoot growth was improved further under drought stress comparing to the parent control (Table 27). More importantly, these transgenic lines had significantly reduced transpiratory water loss during the drought period as shown at day 4, 5 and 6 (Table 28).

TABLE 27
Detailed biomass for selected lines and their control start of
drought (day 0), after 4 days of drought and 6 days of drought.

| | | Days to flower | | Shoot DW (g) - day 0 | | | Shoot DW (g) - day 4 | | | Shoot DW (g) - day 6 | | |
|---|---|---|---|---|---|---|---|---|---|---|---|---|
| | | | Std | | Std | % | | Std | % | | Std | % |
| Entry | Rep# | Mean | Err | Mean | Err | Ctrl | Mean | Err | Ctrl | Mean | Err | Ctrl |
| 5 | 8 | 30 | 0.6 | 4.61 | 0.4 | 105% | 5.65 | 0.4 | 103% | 5.26 | 0.4 | 118% |
| 4 | 8 | 30.9 | 1.2 | 4.37 | 0.4 | 99% | 5.7 | 0.3 | 103% | 5.11 | 0.3 | 114% |
| 6 | 8 | 29.9 | 0.6 | 4.86 | 0.5 | 110% | 6.01 | 0.5 | 109% | 5.09 | 0.4 | 114% |
| 30 | 8 | 29.9 | 0.4 | 4.49 | 0.4 | 102% | 5.58 | 0.3 | 101% | 4.88 | 0.2 | 109% |
| 27 | 8 | 31.1 | 0.7 | 5.08 | 0.4 | 115% | 5.28 | 0.3 | 96% | 4.75 | 0.2 | 106% |
| 25 | 8 | 29.6 | 0.8 | 4.57 | 0.4 | 104% | 5.43 | 0.3 | 99% | 4.56 | 0.2 | 102% |
| Control | 8 | 30.1 | 0.6 | 4.41 | 0.4 | — | 5.5 | 0.3 | — | 4.47 | 0.3 | — |

(Bold - indicates significant difference to control).

TABLE 28
Water lost relative to biomass for selected lines and
their control over the course of 4-and 6-day drought.

| | | Water lost in 4 d/ | | | Water lost in 5 d/ | | | Water lost in 6 d/ | | |
|---|---|---|---|---|---|---|---|---|---|---|
| | | shoot DW - d 6 | | | shoot DW - d 6 | | | shoot DW - d 6 | | |
| | | | Std | % | | Std | % | | Std | % |
| Entry | Rep# | Mean | Err | Ctrl | Mean | Err | Ctrl | Mean | Err | Ctrl |
| 5 | 8 | 54.85 | 2.7 | 86% | 61.64 | 3.5 | 86% | 65.49 | 4 | 86% |
| 4 | 8 | 56.47 | 2.2 | 88% | 62.56 | 2.5 | 87% | 66.66 | 3 | 87% |
| 6 | 8 | 59.34 | 4.1 | 93% | 65.08 | 4.7 | 91% | 68.54 | 5.2 | 90% |
| 25 | 8 | 60.18 | 4.1 | 94% | 66.3 | 5 | 92% | 69.94 | 5.5 | 92% |
| 30 | 8 | 62.37 | 1.8 | 97% | 67.41 | 2.3 | 94% | 70.76 | 2.7 | 93% |
| 27 | 8 | 62.37 | 1.4 | 97% | 68.76 | 1.8 | 96% | 72.3 | 2.1 | 95% |
| Control | 8 | 64.08 | 3.1 | — | 71.74 | 3.5 | — | 76.25 | 3.8 | — |

(Bold - indicates significant difference to control).

[0170] Drought yield-Soybean seeds of homozygous transgenic lines of 35S-GmExo090 and the parent controls were direct seeded into pre-weighed 4″ shallow pots with 3 treatments: optimal yield, drought yield, and drought screen (10 reps/entry/treatment except 4-2, 4-3; 5 reps/entry/treatment) and placed directly into a grow chamber under optimal conditions (22° C.; 14 hrs light, ˜500 μE). At 4 days into flowering, plants in the drought treatments were watered up to and covered with foil. Drought screen plants were weighed daily for 5 consecutive days and then harvested for shoot biomass and root biomass. Drought yield plants were weighed daily until they reached <30-50% SWC (below 190 g) and then maintained at that level for 5 days before being re-watered and returned to optimal conditions. Optimal and drought yield plants were measured for non-destructive parameters 18 days from flowering. All statistical analysis was completed using a 2-way ANOVA and significant comparisons were made with a Student's T at 10% level of significance. Most of the lines had a trend of more pods under optimal condition and all lines had significant more pods at the point of assessment comparing to their parent control.

[0171] More pods are formed under both optimal and drought conditions with statistical significance under stress condition, indicating that overexpression of GmExo090 ultimately improves seed yield of the transgenic soybean plants (Table 29) and the same strategy can be applied to all plant species.

TABLE 29
Number of pods for selected lines and control under
optimal conditions and after drought stress.

| | | # visible pods | | | | | | |
|---|---|---|---|---|---|---|---|---|
| | | Optimal | | | Drought | | | |
| Entry | # Reps | Mean | Std Err | % Ctrl | Mean | Std Err | % Ctrl | % opt |
| 4 | 5 | 29.4 | 1.3 | 101% | 32.4 | 2.4 | 145% | 110% |
| 30 | 10 | 34.6 | 2.4 | 119% | 30.2 | 2.6 | 135% | 87% |
| 6 | 10 | 35.1 | 2.3 | 121% | 28.9 | 2.7 | 130% | 82% |
| 5 | 10 | 33.1 | 2.6 | 114% | 25.7 | 2.1 | 115% | 78% |
| Control | 10 | 29.1 | 2 | — | 22.3 | 2.3 | — | 77% |

(Bold - indicates significant difference to control).

[0172] Low N and P hydroponic-Soybean seeds of the homozygous transgenic lines of 35S-GmExo090 and parent control Jack were direct seeded into 36 cell soil trays and placed directly into a 3-teir grow chamber under optimal conditions (22° C.; 18 hr light, ˜200 μE). At early germination 18 replicates of each entry were transplanted into 250 ml glass bottles covered with aluminum foil and filled with modified Hoagland's solution to create optimal, low nitrogen (1/100^{th} optimal) and low phosphorus (1/10^{th} optimal) conditions. 6 replicates per entry were in each of three treatments. The nutrient solution was replaced twice weekly and topped up as necessary. All plants were maintained in the nutrient solutions for 3 weeks from transplants, at which point they were harvested for both shoot and root biomass. All statistical analysis was completed using a 2-way ANOVA and significant comparisons were made with a Student's T at 10% level of significance. Both lines had increased shoot and more significantly root biomass comparing to the parent control under optimal, low N and low P conditions.

[0173] Under optimal condition, the lines had slightly increased shoot and root biomass compared to the control; and under the low nitrogen and phosphorus treatment, these lines had increased shoot and root biomass compared to the control with statistically significant difference (Table 30).

TABLE 30
Shoot biomass, root length and root biomass for selected lines and control grown
hydroponically in optimal, low nitrogen and low phosphorus conditions.

| | | Shoot Biomass (g) | | | | | | | | | | | | |
|---|---|---|---|---|---|---|---|---|---|---|---|---|---|---|
| | | Optimal | | | Low N | | | | | Low P | | | | |
| | | | Std | % | | Std | % | % | % | | Std | % | % | % |
| Entry | Rep# | Mean | Err | Ctrl | Mean | Err | Ctrl | opt | prot'n | Mean | Err | Ctrl | opt | prot'n |
| 6 | 6 | 1.35 | 0.06 | 103% | 0.54 | 0.05 | 124% | 40% | 7% | 0.73 | 0.06 | 107% | 54% | 2% |
| 30 | 6 | 1.37 | 0.04 | 105% | 0.54 | 0.06 | 125% | 39% | 6% | 0.98 | 0.03 | 143% | 72% | 19% |
| Control | 6 | 1.3 | 0.06 | — | 0.44 | 0.02 | — | 33% | — | 0.69 | 0.05 | — | 53% | — |
| | | Root Biomass (g) | | | | | | | | | | | | |
| | | Optimal | | | Low N | | | | | Low P | | | | |
| | | | Std | % | | Std | % | % | % | | Std | % | % | % |
| Entry | Rep# | Mean | Err | Ctrl | Mean | Err | Ctrl | opt | prot'n | Mean | Err | Ctrl | opt | prot'n |
| 6 | 6 | 0.67 | 0.03 | 104% | 0.39 | 0.05 | 126% | 58% | 10% | 0.47 | 0.04 | 115% | 70% | 7% |
| 30 | 6 | 0.7 | 0.03 | 109% | 0.37 | 0.04 | 120% | 53% | 5% | 0.57 | 0.02 | 141% | 82% | 18% |
| Control | 6 | 0.64 | 0.03 | — | 0.31 | 0.01 | — | 48% | — | 0.41 | 0.03 | — | 63% | — |

(Bold - indicates significant difference to control; NSD = no significant differences)
(% prot'n = the difference from optimal conditions compared to the control).

### 18. Loss-of-Function of AtExo970 in Arabidopsis Via CRISPR Editing

[0174] To construct a plasmid vector carrying both sgRNA and Cas9 cassettes, the sequence of Cas9 was assembled downstream of an Arabidopsis ubiquitin promoter together with two customized sgRNA driven by Arabidopsis U6 promoter, respectively. Four guide RNA sequences were carefully selected to target the AtExo1 of AtExo970 within the coding region of exon 2, 4 and 5, respectively (gRNA1(Exon2), SEQ ID NO:68; gRNA2(Exon4): SEQ ID NO:69; gRNA3(Exon4): SEQ ID NO:70; gRNA4(Exon5): SEQ ID NO:71). For each sgRNA, a pair of complementary oligonucleotides was synthesized and annealed to generate double-stranded DNA oligonucleotide, which were subsequently integrated upstream of the sgRNA scaffolds in the plasmid vector. The fragment containing the sgRNA and Cas9 cassettes was subcloned into a binary vector which contains a hygromycin resistance gene as a selection marker. Agrobacterium GV3101 containing the constructs were used to transform Col and d200 mutant via floral dipping. T1 seedlings were selected on MS plates containing hygromycin. Genomic DNA from leaves of transgenic plants was used for PCR amplification of relevant regions with specific primers flanking the target sites. PCR amplicons were assessed by T7 Endonuclease I (T7EI) or Cell mismatch assays and Sanger sequencing to identify the plants with InDel mutation at the target loci. The sequencing chromatograms were carefully examined for exact patterns that might indicate monoallelic or diallelic mutations.

### 19. Up-Regulation of GmExo090 by CRISPR Mediated Promoter Knock-In in Soybean

[0175] To generate transgene-free soybean overexpressing AtExo970 homologs, a constitutive promoter or an inducible promoter will be introduced to the 5′ end of GmExo090. As this gene has demonstrated similar effects as AtEx970 when overexpressed in Arabidopsis. The genomic DNA sequence of GmExo090 and flanking sequence was downloaded from SoyBase. Up to 2kb sequence upstream of the TSS was analyzed by various promoter analysis tools to identify the motifs and TF binding sites. This helps to determine the region to place the new promoter.

[0176] Then, we use a comprehensive guide RNA selection and evaluation process to choose highly effective guide RNA while minimizing off-target effect. Lists of putative guide RNAs were first generated using web-based tools such as CRISPR-P (crispr.hzau.edu.cn/CRISPR2/), CRISPR-PLANT (www.genome.arizona.edu/crispr2/). These lists were crosschecked and went through local single-guide RNA(sgRNA) designing tool such as CRISPR-Local to narrow down to ˜10 candidates based on several criteria such as location, off-target potential etc. These candidates were further reviewed manually to check their homology, PAM efficiency etc to choose the final guide RNAs for each target.

[0177] The final constructs used for transformation are binary vectors contain four major components within the two T-DNA borders: 1, A plant codon optimized Cas9 driven by a constitutive promoter, an inducible promoter or a tissue specific promoters to express the Cas9 as needed in planta; 2, A cassette to express guide RNA which is driven by a type Ill RNA polymerase Ill promoter such as U6; 3, The HDR template containing the new promoter flanked by 100-500 bp of DNA sequences from soybean genome flanking the Cas9 cutting site on each side, respectively; 4, A selection marker for plant transformation such as BASTA and hygromycin. Agrobacterium harboring the final constructs will be used to transform soybean. PCR will be used to confirm the transgene in the TO plants. T1 plants will be screened by PCR using a set of primers extend beyond the junction of the introduced promoter and the original HDR template. Ideally, transgene-free plants containing the new promoter can be identified in the T1 or T2 population. If not, the transgenic plants containing the new promoter will be back crossed with Jack to remove the transgene. Once the desired genotype is identified, seeds will be advanced and further physiology study will be carried out to evaluate the effect of the GmExo090 under the control of the new promoters.

[0178] Constructs for CRISPR mediated promoter knock-in were generated and transformed into the soybean Jack cultivar: construct pEGC11-GmExo29HDR to insert the AtRd29A while construct pEGC11-GmExo990HDR to insert GmUBC990 promoter at the 5′ end of the endogenous GmExo090. Guide RNA GmExo090g1 (SEQ ID NO:72) is used to direct SpCas9 to generate a DSB at the −67 of ATG. Complementary oligos oGmExo090g1F (SEQ ID NO:73) & oGmExo090g1R (SEQ ID NO:74) were chemically synthesized. After annealing, they were cloned into Bbsl digested pU626A vector. The gRNA expression cassette was digested with restriction enzymes HindIII and XmaI and cloned into pGC11 vector, resulted in pGC11-GmExo. To generate the HDR template for the inducible AtRd29A promoter, primer set GmExo090 HDR-F (SEQ ID NO:75) and Exo090Rd29A5Lnk-R (SEQ ID NO:78) were used to amplify the 5′ HDR arm using Jack genomic DNA as a template. Primer set GmExo090HDR-R (SEQ ID NO:76) and Exo090Rd29A3Lnk-F (SEQ ID NO:79) were used to amplify the 3′ HDR arm using Jack genomic DNA as a template. Primer set Exo090Rd29A5Lnk-F (SEQ ID NO:77) and Exo090Rd29A3Lnk-R (SEQ ID NO:80) were used to amplify the AtRd29A promoter using Arabidopsis Col genomic DNA as a template. The three PCR fragments were assembled by two rounds of overlapping PCR and the final HDR templates is disclosed as GmExo29HDR (SEQ ID NO:411). GmExo29HDR was digested with KpnI and EcoRI and cloned into pGC11-GmExo, resulted in pGC11-GmExo29HDR. pGC11-GmExo29HDR was digested with HindIII and EcoRI and cloned into binary expression vector pEGHE, resulted in pEGC11-GmExo29HDR. To generate the HDR template for the constitutive GmUBC990 promoter, primer set GmExo090HDR-F (SEQ ID NO:75) and Exo090UBC9905Lnk-R (SEQ ID NO:82) were used to amplify the 5′ HDR arm using Jack genomic DNA as a template. Primer set GmExo090HDR-R (SEQ ID NO:76) and Exo090UBC9903Lnk-F (SEQ ID NO:83) were used to amplify the 3′ HDR arm using Jack genomic DNA as a template. Primer set Exo090UBC9905Lnk-F (SEQ ID NO:81) and Exo090UBC9903Lnk-R (SEQ ID NO:84) were used to amplify the GmUBC990 promoter using Jack genomic DNA as a template. The three PCR fragments were assembled by two rounds of overlapping PCR and the final HDR templates is disclosed as GmExo990HDR (SEQ ID NO:412). GmExo990HDR was digested with KpnI and EcoRI and cloned into pGC11-GmExo, resulted in pGC11-GmExo990HDR. pGC11-GmExo990HDR was digested with HindIII and EcoRI and cloned into binary expression vector pEGHE, resulted in pEGC11-GmExo990HDR.

[0179] The pEGC11-GmExo29HDR and pEGC11-GmExo990HDR constructs were transformed into soybean Jack via Agrobacterium mediated transformation, respectively. The transgenic lines were selected on Basta, recovered and advanced to T2. Transgene free T3 lines with homozygous AtRd29A or GmUBC990 promoter integration were selected. These lines were advanced to T4 and tested for plant growth, development and productivity as well as tolerance to drought and N & P deficiency of the transgenic lines are being evaluated in comparison of the controls including wild type and segregated nulls.

[0180] The pEGC11-GmExo29HDR and pEGC11-GmExo990HDR constructs were transformed into soybean Jack via Agrobacterium mediated transformation, respectively. The transgenic lines were selected on Basta, recovered and advanced to T2. Transgene free T3 lines with homozygous AtRd29A or GmUBC990 promoter integration were selected. These lines were advanced to T4 and tested for plant growth, development and productivity as well as tolerance to drought and N & P deficiency of the transgenic lines are being evaluated in comparison of the controls including wild type and segregated nulls.

20. Overexpression of AtExo970 and its Orthologs Such as GmExo090 can be Combined with herbicide resistance in crop plants for additive effects

[0181] To facilitate the application of this invention in crop plants for field farming, herbicide resistances to glyphosate (GPR) and glufosinate (GFR) were stacked with current invention. Binary constructs such as p6A0-BoG-35S-GmExo090, p6A0-BoG-pGmUBC990-GmExo090, p6A0-BoG-RD29A-GmExo090 and p7CA-BoG-pGmUBC990-GmExo090 were made to have the 2 herbicide cassettes as well as GmExo090 cassette in a single T-DNA for soybean transformation.

### 20.1. GPR Expression Cassette for Glyphosate Resistance

[0182] 5-enolpyruvylshikimate-3-phosphate synthase (EPSPS) from Agrobacterium tumefaciens (CP4) has been used for glyphosate resistance in soybean. GPR-CDS (SEQ ID NO:421) was synthesized encoding a fusion protein named GPR (SEQ ID NO:418). GPR contains a CP4 fused with a chloroplast transit peptide AtBCP-CTP (SEQ ID NO:416, SEQ ID NO:417) of Arabidopsis biotin carboxyl-carrier protein (At5g16390). The GPR-CDS is 18% different from in patent of U.S. Pat. No. 5,633,435A.

[0183] 5′ UTR sequence of 108 bp from AtBCP (SEQ ID NO:419) and 3′ UTR sequence of 168 bp from AtEPSPS (SEQ ID NO:420) were added respectively to 5′ and 3′ ends of GPR-CDS for optimal gene expression in planta.

[0184] Other chloroplast-targeting signal from Arabidopsis rubisco activase protein (AtRCA-CTP, At2G39730, SEQ ID NO:424, SEQ ID NO:425) was also used to replace AtBCP-CTP in GPR.

[0185] Soybean pGmEF240 promoter (SEQ ID NO:426) was characterized as strong constitutive promoter from Glyma19g07240 locus, which encodes an elongation factor. Primer pair GmEF240-SaI1-F (SEQ ID NO:85) and GmEF240-EcoR1-R (SEQ ID NO:86) was used to amplify pGmEF240 promoter DNA from soybean genomic DNA.

[0186] GPR cassette was first modified by adding XhoI and AvrII to its 5′ or 3′ end respectively using PCR primers of BcpGR-XhoI-F (SEQ ID NO:95) and BcpGR-AvrII-R (SEQ ID NO:96). pGmEF240 was then inserted upstream GPR cassette by XhoI-StuI double digestion. The 3′-UTR of tubulin gene of Glyma10g40150 (Tub-T, SEQ ID NO: 428) was amplified from soybean Jack gDNA using primers of tGmTub-AvrII-F (SEQ ID NO: 89) and tGmTub-Spe-R (SEQ ID NO: 90). Tub-T was cloned downstream GPR as terminator by AvrII-SpeI double digestion. These cloning resulted in the expression cassette of pGmEF240-GPR-Tub-T in p6A0-G construct.

[0187] Strong promoters from other legume species, such as pVaEF670 (SEQ ID NO:452), pVrEF027 (SEQ ID NO:453), pPsEF774 (SEQ ID NO:454) and pPsEF893 (SEQ ID NO:455), were also used to drive GPR expression in various constructs after confirmation of their promoter activity in driving GUS expression in Arabidopsis.

[0188] Promoter pVaEF670 (SEQ ID NO:452) contains 1763 nucleotides covering −1 to −1763 bps upstream start codon of Vigna angularis elongation factor 1-alpha gene (LOC108345670). pVaEF670 was amplified by PCR using primer pair pVaEF670-F1 and pVaEF670-R1. It was introduced into pEG-A35S-GUS vector to drive GUS gene. Transgenic Arabidopsis seedlings carrying pVaEF670-GUS cassette showed stronger GUS staining in airy parts than the seedlings carrying 35S-GUS. In roots, similar Gus expression was observed in seedlings carrying either pVaEF670-GUS or 35S-GUS.

[0189] Promoter pVrEF027 (SEQ ID NO:453) contains 1712 nucleotides, covering −1 to −1712 bps upstream start codon of Vigna radiata (var. radiate) elongation factor 1-alpha (LOC106771027) gene. pVrEF027 was amplified by PCR using primer pair pVrEF027-F1 and pVrEF0270-R1. It was introduced into pEG-A35S-GUS vector to drive GUS gene. Transgenic Arabidopsis seedlings carrying pVrEF027-GUS cassette showed stronger GUS staining than those carrying 35S-GUS in both roots and airy parts.

[0190] Promoter pPsEF774 (SEQ ID NO:454) contains 1562 nucleotides, covering from −1 to −1562 bps upstream start codon of an elongation factor derived from Pisum sativum (cultivar Gradus No 2) whole genome shotgun sequence PUCA012449774. pPsEF774 was amplified by PCR using primer pair pPsEF774-F1 and pPsEF774-R1. It was introduced into pEG-A35S-GUS vector to drive GUS gene. Transgenic Arabidopsis seedlings containing pPsEF774-GUS cassette have a similar GUS staining to those containing 35S-GUS in both roots and airy parts.

[0191] Promoter pPsEF893 (SEQ ID NO:455) contains 1783 nucleotides, covering from −1 to −1783 bps upstream start codon of an elongation factor derived from Pisum sativum (cultivar Gradus No 2) whole genome shotgun sequence PUCA013332893. pPsEF893 was amplified by PCR using primer pair pPsEF893-F1 and pPsEF893-R1. It was introduced into pEG-A35S-GUS vector to drive GUS gene. Transgenic Arabidopsis seedlings carrying pPsEF893-GUS cassette have weaker GUS staining than those carrying 35S-GUS in both roots and airy parts.

### 20.2. GFR Expression Cassette for Glufosinate Resistance

[0192] Phosphinothricin acetyl transferase from Streptomyces hygroscopicus renders resistance to glufosinate (named GFR here). An optimized GFR-CDS (SEQ ID NO:429) was synthesized encoding GFR (SEQ ID NO:430). GFR-CDS is 29% different from to that in U.S. Pat. No. 5,561,236A. Four nucleotides (AACA) were added upstream ATG to facilitate translation initiation in plants.

[0193] GFR was first modified by adding Pacl, Sall and EcoRI to its 5′ end for cloning convenience. GFR was amplified using primers of BarOp-EcoR1-F (SEQ ID NO:91) and BarOp-BstBI-R (SEQ ID NO:92), and then incorporated into p6A0-G via EcoRI-BstBI double digestion. 35S promoter was put upstream GFR via SaII-EcoRI double digestion. 3′-UTR of soybean ribosome gene Glyma08g17870 (Rib-T, SEQ ID NO:431) was amplified from soybean Jack genomic DNA using primers of GmRibT-BstBI-F (SEQ ID NO:93) and GmRibT-StuI-R (SEQ ID NO:94), and then cloned into BstBI site downstream GFR as terminator. These cloning resulted in the expression cassette of 35S-GFR-RibT in p6A0-BoG construct.

[0194] Stronger promoter pPvEF2 (Phvul.004G075100, SEQ ID NO:427) from common bean was also used to drive GPR and pGmEF240 to drive GFR, which resulted in construct p7CA-BoG. Primer pair of PvEF2-StuI-F (SEQ ID NO:87) and PvEF2-XhoI-R (SEQ ID NO:88) was used to amplify pPvEF2 promoter from common bean genomic DNA. pGmEF240 (SEQ ID NO:426) in p6A0-BoG was then replaced by pPvEF2 (SEQ ID NO:427) via StuI-XhoI double digestion, and 35S by pGmEF240 via SaI1-EcoRI digestion. Promoter of soybean gene Glyma03g30110 (GmAct110, SEQ ID NO:414) and Glyma09g40960 (GmUBC960, SEQ ID NO:415) were also tested for GFR expression.

[0195] Promoters from other legume species, such as pPsEF817 (SEQ ID NO:456) and pVaEF895 (SEQ ID NO:457), were also analyzed for driving GFR expression in various constructs after confirmation of their promoter activity in driving GUS expression in Arabidopsis.

[0196] Promoter pPsEF817 (SEQ ID NO:456) contains 1801 nucleotides, covering from −1 to −1802 bps upstream start codon of an elongation factor derived from Pisum sativum (cultivar Gradus No 2) whole genome shotgun sequence PUCA012012817. pPsEF817 was amplified by PCR using primer pair pPsEF817-F1 and pPsEF817-R1. It was introduced into pEG-A35S-GUS vector to drive GUS gene. Transgenic Arabidopsis seedlings carrying pPsEF817-GUS cassette have a GUS expression stronger than those carrying 35S-GUS in both roots and airy parts.

[0197] Promoter pVaEF895 (SEQ ID NO:457) contains 1749 nucleotides, covering −1 to −1749 bps upstream start codon of Vigna angularis elongation factor 1-alpha-like (LOC108325895) gene. pVaEF895 was amplified by PCR using primer pair pVaEF895-F1 and pVaEF895-R1. It was introduced into pEG-A35S-GUS vector to drive GUS gene. Transgenic Arabidopsis seedlings carrying pVaEF895-GUS cassette showed faint Gus staining in both root and airy parts, much weaker than control seedlings carrying 35S-GUS.

[0198] Promoter pPcEF357 (SEQ ID NO:458) contains 1519 nucleotides, covering −277 to −1796 bps upstream start codon of Phaseolus coccineus (subsp. coccineus cultivar Hammond's Dwarf Red Flower) elongation factor whole genome shotgun sequence (QBDZ01192357). pPcEF357 was amplified by PCR using primer pair pPcEF357-F1 and pPcEF357-R1. It was introduced into pEG-A35S-GUS vector to drive GUS gene. Transgenic Arabidopsis seedlings carrying pPcEF357-GUS showed no visible GUS staining in both root and airy parts.

[0199] pPsEF817 (SEQ ID NO:456) was used to replace 35S in p7E0-BoG for strong GFR expression, which resulted in p7E7-BoG.’

20.3. Combining GmExo090 with GPR and GFR Cassettes in a Single T-DNA

[0200] Constitutive over-expression of GmExo090 (SEQ ID NO:174) in Arabidopsis (Section 9.0) significantly enhanced drought tolerance of transgenic plants. To combine herbicide resistance together with current invention, GFR-GPR (BoG) bi-cassette was cut from p6A0-BoG plasmid and then inserted into pEG-35S-GmExo090 plasmid (Section 9.0) in place of Bar via SacI-SpeI or SacI-EcoRI digestion respectively. These cloning produced construct p6A0-BoG-35S-GmExo090. Promoter pGmUBC990 from soybean ubiquitin-conjugating enzyme (Glyma02g35990, SEQ ID NO:432) was characterized as constitutive moderate promoter. It was amplified from Jack genomic DNA using primers of GmUBC990-Stu1-F (SEQ ID NO:97) and GmUBC990-Xho-R (SEQ ID NO:98). 3′-UTR of soybean Ubiquitin gene Glyma09g02760 (Ubi-T, SEQ ID NO:433) was amplified from Jack using GmUbiT-Xba-F (SEQ ID NO:99) and UbiT-EcoR1Pvu1-R (SEQ ID NO:100) primers. pGmUBC990, GmExo090 and Ubi-T were assembled together in an intermediate cloning vector. pGmUBC990-GmExo090-Ubi-T cassette was then moved into p6A0-BoG or p7CA-BoG vector to have final construct p6A0-BoG-pGmUBC990-GmExo090 or p7CA-BoG-pGmUBC990-GmExo090 respectively.

[0201] To mitigate the possible side-effect of constitutive over-expression of GmExo090 on soybean growth and development, promoter RD29A and root specific promoter were used to replace 35S in pEG-35S-GmExo090. RD29A-GmExo090 fragment was amplified by PCR with PvuI attached to N-terminal and BamHI attached to its C-terminal via primers RD29a-PvuI-F (SEQ ID NO:119) and GmExo090 BcIIR (SEQ ID NO:120). This fragment was put into BamHI/PvuI double-digested p6A0-BoG-tGmUbi vector to make construct p6A0-BoG-Rd29A-GmExo090. pVaEF670 (SEQ ID NO:452), pVrEF027 (SEQ ID NO:453), pPsEF774 (SEQ ID NO:454) and pPsEF893 (SEQ ID NO:455) were used to replace pGmEF240 (SEQ ID NO:426) in p6A0-BoG for strong GPR expression, which resulted in p7D0-BoG, p7E0-BoG, p7F0-BoG and p7GO-BoG respectively. pGmUBC990-GmExo090-Ubi-T cassette was put into p7D0-BoG and p7E0-BoG resulting in 2 final constructs for soybean transformation: p7D0-BoG-HP-GmFTB1-GmExo090-2R and p7E0-BoG-HP-GmFTB1-GmExo090-2R.

[0202] To analyze the tempo-spatial effects of GmExo090 's over-expression in soybean plants, three root-specific promoters were tested in Arabidopsis and then used to drive GmExo090 expression in soybean. Promoter pGmTIPs (SEQ ID NO:459) contains 1546 nucleotides, covering from −1 to −1546 bps upstream start codon of Glymallg03690. pGmTIPs was amplified by PCR using primer pair pGmTIPs-F1 (SEQ ID NO:476) and pGmTIPs-R1 (SEQ ID NO:477). It was then used to drive GmExo090 expression in pGmTIPs-GmExo090-tGmUbi cassette in GPR-GFR construct of p7E7-BoG-HP-GmFTB1-GmExo090-6R, which is derived from p7E7-BoG-HP-GmFTB1 via Pmel digestion.

[0203] Promoter pGmNTT490 (SEQ ID NO:460) contains 1914 nucleotides, covering from −12 to −1925 bps upstream start codon of soybean Glyma.17g124900, which encodes for a nitrate transmembrane transporter. GmNTT490 was amplified by PCR using primer pair pGmNTT490-F1 (SEQ ID NO:478) and pGmNTT490-R1 (SEQ ID NO:479). It was introduced into pEG-A35S-GUS vector to drive GUS gene. Transgenic Arabidopsis seedlings carrying pGmNTT490-GUS cassette have a strong GUS expression in roots and moderate expression in young leaves.

[0204] Promoter pGmDOG690 (SEQ ID NO:461) contains 2080 nucleotides, covering from −5 to −2084 bps upstream start codon of soybean Glyma.09g156900, which encodes for a LigB dioxygenase. pGmDOG690 was amplified by PCR using primer pair pGmDOG690-F1 (SEQ ID NO:480) and pGmDOG690-R1 (SEQ ID NO:481). It was introduced into pEG-Δ35S-GUS vector to drive GUS gene. Transgenic Arabidopsis seedlings carrying pGmDOG690-GUS cassette have visible GUS expression in hypocotyls, but not in other parts of the seedlings.

[0205] Root-specific pGmTIPs-driven GmExo090-Ubi-T cassette was put into p7E0 and p7E7-BoG respectively, which resulted in two final constructs for soybean transformation: p7E0-BoG-HP-GmFTB1-GmExo090-6R and p7E7-BoG-HP-GmFTB1-GmExo090-6R.

[0206] Soybean transformation was performed as described in Section 17.1.

### 21. Overexpression of AtExo970 and its Orthologs Such as GmExo090 can be Combined With Both Pest- and Herbicide Resistance in Crop Plants for Additive Effects

[0207] To further facilitate the application of this invention in crop plants for field farming, resistance to common Lepidopteran and Coleopteran insects was further stacked with this invention. Binary construct p7CA-3Bt4-GmExo090 was made to contain 3 Cry expression cassettes in addition to GFR-GPR-GmExo090 tri-cassettes (Section 20) in a single T-DNA fragment for soybean transformation.

### 21.1. Selection of Cry1Ac, Cry1Ca and Cry3Aa for Pest Resistance

[0208] Bacilus thuringensis (Bt) has more than 100 subspecies or strains isolated from around world. The crystal endotoxins (Cry) of 5 major strains were commonly used to control different types of insects. There are >770 Cry endotoxins reported so far, which are classified into 74 groups i.e. Cry1 to Cry74. We selected Cry1Ac and Cry1Ca for control of moth larva and Cry3Aa for control of beetles in soybean.

[0209] Cry1Ac from strain Kurstaki HD73 is quite conserved with Cry1Aa and Cry1Ab, which have been widely applied in cotton, corn and soybean against Lepidopteran insects. Cry1Ac, in particular, is reported to be effective against soybean looper, budborer, velvetbean caterpillar, cornstalk borer etc.

[0210] Cry1Ca from strain Entomocidus was often used in corn, rice and cotton in combination with Cry1A to widen resistance spectrum against Lepidopteran insects. Cry1Ca was reported to be effective against beet armyworm and cotton leaf worm etc.

[0211] Cry3Aa from strain San Diego has low toxicity against Lepidopteran insects, but has high insecticidal activity against Coleopteran insects (beetles) such as Colorado potato beetle and western corn root worm etc.

21.2. Stacking Cry1Ac-Cry1Ca-Cry3Aa Tri-Cassette with GmExo090 and Herbicide Resistance in Single T-DNA

[0212] Cry proteins from different groups have rather diversified sequences, but their N-terminal core sequence for toxicity has a much conserved 3D structure. Thus, only N-terminal core sequence of Cry1Ac, Cry1Ca and Cry3Aa was used for their expression in soybean.

[0213] The protein sequence of Cry1Ac (SEQ ID NO:434, GenBank M11068), Cry1Ca (SEQ ID NO:435, GenBank: X07518.1) and Cry3Aa (SEQ ID NO:436; GenBank: AAA22336) was back-translated based on codon usage in soybean and corn. The codon-optimized nucleotide sequences of Cry1Ac-NT (SEQ ID NO:437), Cry1Ca-NT (SEQ ID NO:438) and Cry3Aa-NT (SEQ ID NO:439) were joined together as a single open frame using 2Ak or 2Ao linkers, which resulted in Cry1AC3A-NT (SEQ ID NO:443). 5′ and 3′ UTRs (SEQ ID NO:440; SEQ ID NO:441) of soybean Rubisco small subunit gene were added to 5′ or 3′ ends of Cry1AC3A-NT for optimal expression of Cry1AC3A (SEQ ID NO:442). Cry1AC3A-NT was synthesized and then cloned into pEarleyGate under 35S promoter, which resulted in construct pEG-35S-Synth1.

[0214] Individual Cry1Ac, Cry1Ca or Cry3Aa expression cassettes were made under control of different soybean promoters. Three endogenous promoters of pGmEF630 (SEQ ID NO:444), pGmEF110 (SEQ ID NO:445) and PGmAct7 (SEQ ID NO: 446) were amplified by PCR from soybean Jack genomic DNA with corresponding primer pairs of GmEF630-SaI1-F/GmEF630-Xba1-R (SEQ ID NO:101/SEQ ID NO:102), GmEF110-SaI1-F/GmEF110-Spe1-R (SEQ ID NO:103/SEQ ID NO:104) and GmAct7-SaI1-F/GmAct7-Spe1-R (SEQ ID NO:105/SEQ ID NO:106) respectively. Soybean terminators of tGmHS69 (SEQ ID NO:447), tGmH53 (SEQ ID NO:448) and tGmHS70 (SEQ ID NO: 449) were amplified by PCR from Jack genomic DNA with corresponding primer pairs of tGmHS69-Xho-F/tGmHS69-SaI1-R (SEQ ID NO:107/SEQ ID NO:108), tGmH53-SaI1-F/tGmH53-Xho1-R (SEQ ID NO:109/SEQ ID NO:110), and tGmHS70-SaI1-F/tGmHS70-Xho1-R (SEQ ID NO:111/SEQ ID NO:112) respectively. Cry1Ac-NT (SEQ ID NO:437), Cry1Ca-NT (SEQ ID NO:438) and Cry3Aa-NT (SEQ ID NO: 439) were amplified by PCR from the synthesized template (SEQ ID NO:443) with corresponding primer pairs of Cry1Ac-Xba-F/Cry1Ac-Xho-R (SEQ ID NO:113/SEQ ID NO:114), Cry1Ca-Xba-F/Cry1Ca-Xho-R (SEQ ID NO:115/SEQ ID NO:116), and Cry3Aa-Xba-F/Cry3Aa-Xho-R (SEQ ID NO:117/SEQ ID NO:118) respectively.

[0215] Cry1Ac expression cassette (pGmEF630-Cry1Ac-tGmHS69) was made by assembling promoter pGmEF630, Cry1Ac and terminator tGmHS690 together via XbaI and XhoI digestions in a cloning vector. Cry1Ca expression cassette (pGmEF110-Cry1Ca-tGmH53) was made by assembling promoter pGmEF110, Cry1Ca and terminator tGmH53 together via XbaI (SpeI) and XhoI (SaII) digestions. Cry3Aa expression cassette (pGmAct7-Cry3Aa-tGmHS70) was made by assembling promoter pGmAct7, Cry3Aa and terminator tGmHS70 together via XbaI (SpeI) and XhoI (SaII) digestions.

[0216] These 3 cassettes were introduced sequentially into p7CA-BoG-pGmUBC990-GmExo090 (Section 20.3) at Sall site adjacent to left border of T-DNA via SaII-XhoI double digestion. pGmAct7-Cry3Aa-tGmHS70 cassette was first cloned in, followed by pGmEF110-cry1Ca-tGmH53, and pGmEF630-Cry1Ac-tGmHS69. The final construct is p7CA-3Bt4-GmExo090, of which the T-DNA has Cry1Ac-Cry1Ca-Cry3Aa tri-cassette in addition to GFR-GPR-GmExo090 tri-cassette in p7CA backbone.

[0217] Another tri-Cry bloc was made to contain individual cassette of pPsEF774 (SEQ ID NO:454) -driven Cry1Ac-tPs774 (SEQ ID NO:450), pGmEF110 (SEQ ID NO:445)-driven Cry1Ca-tVr027 (SEQ ID NO:451) and pVaEF670 (SEQ ID NO:452)-driven Cry3Aa-tGmHS70 (SEQ ID NO:449). This tri-Cry bloc was cloned into p7E7-BoG-HP-GmFTB1-GmExo090-6R to have the final construct of p7E7-3Bt-BoG-HP-GmFTB1-GmExo090-6R for soybean transformation.

[0218] Co-expression of Cry1Ac, Cry1Ca and Cry3Aa cassettes in a single T-DNA locus provided not only a wide spectrum of resistance against Lepidopteran insects including those tolerant to Cry1Ac but also a parallel resistance against Coleopteran beetle pests in soybean.

[0219] Soybean transformation was performed as described in Section 17.1.

22. Identification of AtExo970 Homologs from Other Crop and Vegetable Species

[0220] There are 128 Archaeplastida species including economically important vegetables, ornamental flowers, crops and trees, of which whole genome has been sequenced and available to public (https://phytozome.jgi.doe.gov). Potential coding sequences in those genomes were also assembled and annotated. Homologs of AtExo970 from 6 species such as canola (Section 8), soybean (Section 9), corn (Section 11), wheat (Section 12), Brachypodium (Section 13) and rice (Section 15) have been described in previous Examples respectively. Blast search of AtExo970 protein against annotated whole genome sequence of other 32 species (https://phytozome.jgi.doe.gov) allows us to identify the protein homologs of AtExo970 and its coding cDNA and genomic fragment (gDNA) (Seq ID NO:211 to Seq ID NO:410) from each of them. The selected species are Brassica oleracea, Brassica rapa, Cotton (Gossypium hirsutum), Cotton (Gossypium raimondii), Barley (Hordeum vulgare), Millet (Setaria italica), Sorghum (Sorghum bicolor), Miscanthus sinensis, Switchgrass (Panicum virgatum), Tomato (Solanum lycopersicum), Cucumber (Cucumis sativus), Lettuce (Lactuca sativa), Cowpea (Vigna nguiculata), Common bean (Phaseolus vulgaris), Chickpea (Cicer arietinum), Carrot (Daucus carota), Asparagus (Asparagus fficinalis), Potato (Solanum tuberosum), Papaya (Carica papaya), Quinoa (Chenopodium quinoa), Apple (Malus omestica), Orange (Citrus sinensis), Grape (Vitis vinifera), Cassava (Manihot esculenta), Cocoa (Theobroma cacao), Coffea (Coffea arabica), Tea (Camellia sinesis), Olive (Olea europaea), Poplar (Populus trichocarpa), Russian Dandelion (Taraxacum kok-saghyz), Sunflower (Helianthus annuus) and Petunia axillaris (Table 32)

TABLE 31
Oligo-nucleotide Sequence for Gene Amplification and Analysis.

| SEQID NO | Sequence Name | Nucleotides | Length |
|---|---|---|---|
| 1 | AD1 | INGTCGASWGANAWGAA | 16 |
| 2 | AD2 | TGWGNAGSANCASAGA | 16 |
| 3 | AD3 | AGWGNAGWANCAWAGG | 16 |
| 4 | AD4 | STTGNTASTNCTNTGC | 16 |
| 5 | AD5 | NTCGASTWTSGWGTT | 15 |
| 6 | AD6 | WGTGNAGWANCANAGA | 16 |
| 7 | pSK-35S-F1 | TCCAACCACGTCTTCAAAGCAAGTGGA | 27 |
| 8 | pSK-35S-F2 | TCAAGATGCCTCTACCGACAGTGGT | 25 |
| 9 | pSK-35S-F3 | TCTGTCACTTCATCGAAAGGACAGT | 25 |
| 10 | pSK-35S-F4 | ACATGGTGGAGCACGACACTCTCGT | 25 |
| 11 | pSK-OCT-R1 | TGACCATCATACTCATTGCTGATCCATG | 28 |
| 12 | pSK-OCT-R2 | TGGACGTGAATGTAGACACGTCGAA | 25 |
| 13 | pSK-OCT-R3 | AGGTCAAACCTTGACAGTGACGACA | 25 |
| 14 | pSK-OCT-R4 | TGGGTGAGATTCCTTGAAGTTGAG | 24 |
| 15 | D200A960-qF1 | TGAGGAGAGTCCTGAGCTTGGTGTGGT | 27 |
| 16 | D200A960-qR1 | ACGTTCAAGAACAGGCACAGCGTCA | 25 |
| 17 | D200A968-qF1 | TCCTCGTATCCAAGTGTGTTGCAGT | 25 |
| 18 | D200A968-qR1 | TGGCTAGATTATACGAGATGATAGAGGA | 28 |
| 19 | D200A970-qF1 | ACCGATCATCAATGGAGTCTTCGGA | 25 |
| 20 | D200A970-qF2 | TCGACTACACGTCATCACGGTCTCCA | 26 |
| 21 | D200A970-qR1 | AAGAGATCTTCATGTGCTCCACCA | 24 |
| 22 | D200A970-qR2 | TCGTCTCGTACCTATAGCTAGTCAC | 25 |
| 23 | D200A970-qF3 | TTCGGAAACTCTAAGGAACAAGTGTG | 26 |
| 24 | D200A970-qR3 | TTGGCAATGGCCCTATGAGATG | 22 |
| 25 | D200A980-qF1 | TCTCGGAGATTAGACGTCGTGACT | 24 |
| 26 | D200A980-qF2 | TGGTAATGGATTCATCGGAGTAGAC | 25 |
| 27 | D200A980-qR1 | TGTGTCCTCCTTCACACCAAGCA | 23 |
| 28 | D200A980-qR2 | ACTATGAGGATACAAGGCATCCTGA | 25 |
| 29 | D200A990-F1 | ATCATACTCGCACTCATTAGTCAT | 24 |
| 30 | D200A990-R1 | TGTTGTAGTAATTGTTGCGTAGGCT | 25 |
| 31 | AtP2A3qF3 | AGTGACTTGGTTGAGCATTTCACTCCTCTG | 30 |
| 32 | AtP2A3qR3 | AGCTGACCATATATTGATCTTAGCTCCGTCT | 31 |
| 33 | P970-EcoRF | TAGAATTCAACTACTTGATGTGGTTTACGCCAT | 33 |
| 34 | P970-XhoR | AACTCGAGTGTACGTATCAGACACTTGCAAGCA | 33 |
| 35 | AtExo970-XmaF | TACCCGGGATGGATTACCGATCATCAATGGAGTC | 34 |
| 36 | AtExo970-BamR | TTGGATCCTTAAGCTAGTGAGTCTAAGCACCA | 32 |
| 37 | AtExo970-SeqR1 | TGAGAGAGTTGCTCAGCTTGCTTG | 24 |
| 38 | D200A970-qR4 | AATGAACATCATACCCGAGATAGG | 24 |
| 39 | AtExo970-SalF2 | AAGTCGACTGCTTGCAAGTGTCTGATACGTAC | 32 |
| 40 | AtExo970-XbaR2 | AATCTAGACCAATGTTATTCGACATTACACTAC | 33 |
| 41 | AtExo310-BglF2 | TTAGATCTGATTAACGCAACATATTTGAGGT | 31 |
| 42 | AtExo310-XbaR1 | AATCTAGAATGCCAAATTACCACCACAATCAC | 32 |
| 43 | BnExo317-XhoF1 | AACTCGAGACTTCTCCCCACTCTTAAATTGTTGAG | 35 |
| 44 | BnExo317-XbaR1 | AATCTAGAAATCAGAAGTAATGCTTATTCGACT | 33 |
| 45 | AtRd29A-Eco1F | ATGAATTCTGCATGTGACATTTAGACCTTATCGGA | 35 |
| 46 | AtRd29A-XhoR1 | TTCTCGAGAAGTAATCAAACCCTTTATTCCTG | 32 |
| 47 | AtExo970-SalF1 | AAGTCGACAATACCTTCTCACACCTTCTCCA | 31 |
| 48 | AtExo970-XbaR1 | AATCTAGAGCATCTCACACAACACACACTCGAA | 33 |
| 49 | GmExo090-XhoF2 | AACTCGAGTGCAAGTTGGAGCAATAGTACCTC | 32 |
| 50 | GmExo090-XbaR2 | AATCTAGATGCATACTAGATATTTGTATCGGT | 32 |
| 51 | GmExo740-XhoF1 | ATCTCGAGAACAAGATATGCTGAATTGGAGCA | 32 |
| 52 | GmExo740-XbaR1 | TATCTAGATATGCACAGAGAATATCATTGCA | 31 |
| 53 | ZmExo846-XhoF1 | ATCGCCAGCCTCGAGATCGATCTCTCTCAA | 30 |
| 54 | ZmExo846-XbaF1 | AATCTAGACGATCTCTCTCAAGGGACCTTGCT | 32 |
| 55 | ZmExo846-XbaR1 | AATCTAGATATTGCTTCTTATACAGATCTAAGGCA | 35 |
| 56 | BdEx60-XhoF1 | AACTCGAGGTTTCAGAGTTCAGAGAGCTTGATCG | 34 |
| 57 | BdExo960-XbaF1 | AATCTAGAGGTTTCAGAGTTCAGAGAGCTTGATCG | 35 |
| 58 | BdEx60-XbaR1 | ACTCTAGATCACCGATATGATACTCAATCC | 30 |
| 59 | BdExo960-BglR1 | ATAGATCTCACCGATATGATACTCAATCCCACCA | 34 |
| 60 | TaExo220-BglF1 | TCTGAGAGATCTTGATCGACCTGC | 24 |
| 61 | TaExo220-XbaF1 | AATCTAGACTTGATCGACCTGCAGGAAGAATCTG | 34 |
| 62 | TaExo220-XbaR1 | AATCTAGATGCCTTGTTCTCTTTAGCTCATCATC | 34 |
| 63 | TaExo220-BglR1 | ATAGATCTGCCTTGTTCTCTTTAGCTCATCATC | 33 |
| 64 | AtExo970-SalF2 | AAGTCGACTGCTTGCAAGTGTCTGATACGTAC | 32 |
| 65 | AtExo970-XbaR2 | AATCTAGACCAATGTTATTCGACATTACACTAC | 33 |
| 66 | OsExo920-XbF1 | TATCTAGACCTTGGTCGACCGATCAGTAAGAGCA | 34 |
| 67 | OsExo920-XmR1 | ATCCCGGGTCAATTCCACTATAATCAAGTCCCAAG | 35 |
| 68 | gRNA1 | GCGTTTGCAAGAAACATTGC | 20 |
| 69 | gRNA2 | AGCTATAGGTACGAGACGAC | 20 |
| 70 | gRNA3 | ATTCAAGAGTTTCTTTGTAA | 20 |
| 71 | gRNA4 | TACTTAACCCAAGCCTATCT | 20 |
| 72 | GmExo090g1 | AGACTTGGACTTGAGGTCAA | 20 |
| 73 | oGmExo090g1-F | GATTAGACTTGGACTTGAGGTCAA | 24 |
| 74 | oGmExo090g1-R | AAACTTGACCTCAAGTCCAAGTCT | 24 |
| 75 | GmExo090HDR-F | AAAGGTACCCGTGACAGCCGAAGTCAATG | 29 |
| 76 | GmExo090HDR-R | AAAGAATTCTGTGCTCCACAAGATGCTCC | 29 |
| 77 | Exo090Rd29A5Lnk-F | TCACCCCACTCCTACCTTTGCGAATATTTTGTATGTTCAGTG | 42 |
| 78 | Exo090Rd29A5Lnk-R | CACTGAACATACAAAATATTCGCAAAGGTAGGAGTGGGGTGA | 42 |
| 79 | Exo090Rd29A3Lnk-F | GGGTTTGATTACTTCTATTGGAAAACCTCAAGTCCAAGTCTTTTC | 45 |
| 80 | Exo090Rd29A3Lnk-R | GAAAAGACTTGGACTTGAGGTTTTCCAATAGAAGTAATCAAACCC | 45 |
| 81 | Exo090UBC9905Lnk-F | tcaccccactcctacctttgGGCCTTTGTTTATGCTAAGTG | 41 |
| 82 | Exo090UBC9905Lnk-R | CACTTAGCATAAACAAAGGCCcaaaggtaggagtggggtga | 41 |
| 83 | Exo090UBC9903Lnk-F | ATCCTTCCTTCGCTCTCTCCacctcaagtccaagtcttttc | 41 |
| 84 | Exo090UBC9903Lnk-R | gaaaagacttggacttgaggtGGAGAGAGCGAAGGAAGGAT | 41 |
| 85 | GmEF240-Sal1-F | aaaGTCGACTTTCATGGTCCGTAGACTTTT | 30 |
| 86 | GmEF240-EcoR1-R | aaaGAATTCGATGACTTAAACTGGAATCAATTC | 33 |
| 87 | PvEF2-StuI-F | cctAGAATTTTACTTAAATCTCTACTAC | 28 |
| 88 | PvEF2-XhoI-R | aaaCTCGAGAACTGCGTTTGAGTATCTGC | 29 |
| 89 | tGmTub-AvrII-F | aaaCCTAGGaatctacttcagattcttgttc | 31 |
| 90 | tGmTub-SpeI-R | aatACTAGTaagaattttaaaaatctcgtttc | 32 |
| 91 | BarOp-EcoR1-F | aaaGAATTCaacaatgagcccagaaagaagacc | 33 |
| 92 | BarOp-BstBI-R | aaaTTCGAAtcaaatctcagtaactggaagaac | 33 |
| 93 | GmRibT-BstBI-F | aaaTTCGAAGGTTTGAGTTTGAGTTCACA | 29 |
| 94 | GmRibT-StuI-R | aaaAGGCCTTAATTATTATATAATCTTGTAT | 31 |
| 95 | BcpGR-XhoI-F | aaaCTCGAGtatcatcttctctctctctttctg | 33 |
| 96 | BcpGR-AvrII-R | aaaCCTAGGtacacattcatttctctcaatcg | 32 |
| 97 | GmUBC990-StuI-F | aaaAGGCCTGGCCTTTGTTTATGCTAAGT | 29 |
| 98 | GmUBC990-Xho-R | ataCTCGAGGATGGGTTGCGCAAGGTTT | 28 |
| 99 | GmUbiT-Xba-F | aaaTCTAGAGATTGTTTTCCATTTGTTTCTG | 31 |
| 100 | UbiT-EcoR1Pvu1-R | aaaGAATTCGATCGCTAACATTAAGTTATCGATAAAGT | 38 |
| 101 | GmEF630-Sal1-F | aaaGTCGACTACAAGCCGCACAATACAAGTCG | 32 |
| 102 | GmEF630-XbaI-R | aaaTCTAGATCCTTAAATCTGCAAAGAAACTAAAAAAGTTG | 41 |
| 103 | GmEF110-Sal1-F | aaaGTCGACTGAGTCATCAAATGCTTGGGCT | 31 |
| 104 | GmEF110-SpeI-R | ataACTAGTCCAACAAAAGTCAAAGCTGAA | 30 |
| 105 | GmAct7-Sal1-F | aaaGTCGACCTAGTTAATTACACAAATTTTAATTCAtCTAGT | 42 |
| 106 | GmAct7-SpeI-R | aaaACTAGTCTTTTACCAAACTACTGTATGC | 31 |
| 107 | tGmHS69-Xho-F | aaaCTCGAGATCTTTAATTGGTTGTTGCTGTCT | 33 |
| 108 | tGmHS69-Sal1-R | aaaGTCGACTGAGAGATTTAGAAAATCATATCG | 33 |
| 109 | tGmH53-Sal1-F | aaaGTCGACAGAATTTAACCCTTCTTTTCTG | 31 |
| 110 | tGmH53-XhoI-R | aaaCTCGAGTATTGTGACAATTCAAATTTATCTTTAAAT | 39 |
| 111 | tGmHS70-Sal1-F | aaaGTCGACACTTGTTGTCGCTGAAAATCCT | 31 |
| 112 | tGmHS70-XhoI-R | aaaCTCGAGAAACAATATAATCAAATTCAATTACTGG | 37 |
| 113 | Cry1Ac-Xba-F | aaaTCTAGAatggataacaacccaaacatc | 30 |
| 114 | Cry1Ac-Xho-R | aaaCTCGAGtcaagcggtcactggaatgaact | 32 |
| 115 | Cry1Ca-Xba- F | aaaTCTAGAatggaggagaacaaccagaa | 29 |
| 116 | Cry1Ca-Xho-R | aaaCTCGAGtcaaatgatctcaatcttatcaatgtag | 37 |
| 117 | Cry3Aa-Xba-F | aaaTCTAGAatgaacccaaacaacaggtc | 29 |
| 118 | Cry3Aa-Xho-R | aaaCTCGAGtcagttcactggaatgaactc | 30 |
| 119 | RD29a-PvuI-F | aaaCGATCGcgaatattttgtatgttcagtg | 32 |
| 120 | GmExo090BclIR | aaaTGATCAtcaatacaaggaatccaagc | 29 |

TABLE 32
Nucleotide or Protein Sequence of Genetic Elements

| Species/Class | SEQ ID NO | Reference | Type | Length |
|---|---|---|---|---|
| Arabidopsis thaliana | 121 | D200_Insert_Border | NT | 100 |
| | 122 | AtExo970_cDNA | NT | 1417 |
| | 123 | AtExo970_CDS | NT | 1074 |
| | 124 | AtExo970 | AA | 357 |
| | 125 | H-NOX | AA | 35 |
| | 126 | AtExo970_5UTR | NT | 127 |
| | 127 | AtExo970_3UTR | NT | 216 |
| | 128 | AtExo970_Promoter | NT | 708 |
| | 129 | AtExo970_gDNA | NT | 2065 |
| | 130 | AtExo310 | AA | 357 |
| | 131 | AtExo310_cDNA | NT | 1349 |
| | 132 | AtExo310_gDNA | NT | 3045 |
| Canola | 133 | BnExo317 | AA | 357 |
| (Brassica napus) | 134 | BnExo317_cDNA | NT | 1453 |
| | 135 | BnExo317_gDNA | NT | 2507 |
| | 136 | BnExo170 | AA | 357 |
| | 137 | BnExo170_cDNA | NT | 1376 |
| | 138 | BnExo170_gDNA | NT | 2204 |
| | 139 | BnExo140 | AA | 356 |
| | 140 | BnExo140_cDNA | NT | 1331 |
| | 141 | BnExo140_gDNA | NT | 3287 |
| | 142 | BnExo180 | AA | 357 |
| | 143 | BnExo180_cDNA | NT | 1074 |
| | 144 | BnExo180_gDNA | NT | 2491 |
| | 145 | BnExo840 | AA | 357 |
| | 146 | BnExo840_cDNA | NT | 1355 |
| | 147 | BnExo840_gDNA | NT | 3507 |
| | 148 | BnExo580 | AA | 357 |
| | 149 | BnExo580_cDNA | NT | 1151 |
| | 150 | BnExo580_gDNA | NT | 2248 |
| Brassica oleracea | 151 | BoExo202 | AA | 357 |
| | 152 | BoExo202_cDNA | NT | 1074 |
| | 153 | BoExo202_gDNA | NT | 2204 |
| | 154 | BoExo942 | AA | 351 |
| | 155 | BoExo942_cDNA | NT | 1056 |
| | 156 | BoExo942_gDNA | NT | 2203 |
| | 157 | BoExo756 | AA | 321 |
| | 158 | BoExo756_cDNA | NT | 966 |
| | 159 | BoExo756_gDNA | NT | 3108 |
| Brassica rapa | 160 | BrExo169 | AA | 357 |
| | 161 | BrExo169_cDNA | NT | 1392 |
| | 162 | BrExo169_gDNA | NT | 2542 |
| | 163 | BrExo302 | AA | 357 |
| | 164 | BrExo302_cDNA | NT | 1074 |
| | 165 | BrExo302_gDNA | NT | 2500 |
| | 166 | BrExo319 | AA | 356 |
| | 167 | BrExo319_cDNA | NT | 1071 |
| | 168 | BrExo319_gDNA | NT | 3288 |
| | 169 | BrExo233 | AA | 357 |
| | 170 | BrExo233_cDNA | NT | 1144 |
| | 171 | BrExo233_gDNA | NT | 4394 |
| Soybean | 172 | GmExo090 | AA | 354 |
| (Glycine max) | 173 | GmExo090_cDNA | NT | 1384 |
| | 174 | GmExo090_clonned | NT | 1298 |
| | 175 | GmExo090_gDNA | NT | 2704 |
| | 176 | GmExo690 | AA | 366 |
| | 177 | GmExo690_cDNA | NT | 1414 |
| | 178 | GmExo690_gDNA | NT | 3320 |
| | 179 | GmExo740 | AA | 366 |
| | 180 | GmExo740_cDNA | NT | 1693 |
| | 181 | GmExo740_gDNA | NT | 3759 |
| | 182 | GmExo740_clonned | NT | 1334 |
| Corn | 183 | ZmExo846 | AA | 336 |
| (Zea may) | 184 | ZmExo846_CDNA | NT | 1330 |
| | 185 | ZmExo846_gDNA | NT | 2410 |
| | 186 | ZmExo807 | AA | 350 |
| | 187 | ZmExo807_cDNA | NT | 1421 |
| | 188 | ZmExo807_gDNA | NT | 1890 |
| Brachypodium | 189 | BdExo960 | AA | 336 |
| distachyon | 190 | BdExo960_cDNA | NT | 1503 |
| | 191 | BdExo960_gDNA | NT | 2339 |
| | 192 | BdExo960_clonned | NT | 1207 |
| Wheat | 193 | TaExo220 | AA | 335 |
| (Triticum aestivum) | 194 | TaExo220_cDNA | NT | 1246 |
| | 195 | TaExo220_gDNA | NT | 1933 |
| | 196 | TaExo220_gClonned | NT | 1780 |
| | 197 | TaExo220_Clonned | AA | 329 |
| | 198 | TaExo220_cClonned | NT | 1002 |
| | 199 | TaExo960 | AA | 354 |
| | 200 | TaExo960_cDNA | NT | 1270 |
| | 201 | TaExo960_gDNA | NT | 2363 |
| | 202 | TaExo506 | AA | 334 |
| | 203 | TaExo506_cDNA | NT | 1234 |
| Rice | 204 | OsExo920 | AA | 336 |
| (Oryza sativa) | 205 | OsExo920_cDNA | NT | 1011 |
| | 206 | OsExo920_gDNA | NT | 2542 |
| | 207 | OsExo770 | AA | 334 |
| | 208 | OsExo770_cDNA | NT | 1005 |
| | 209 | OsExo770_gDNA | NT | 1619 |
| Arabidopsis thaliana | 210 | AtRd29A_Promoter | NT | 1172 |
| Cotton | 211 | GhExo400 | AA | 351 |
| (Gossypium hirsutum) | 212 | GhExo400_cDNA | NT | 1129 |
| | 213 | GhExo400_gDNA | NT | 2549 |
| | 214 | GhExo800 | AA | 340 |
| | 215 | GhExo800_cDNA | NT | 1023 |
| | 216 | GhExo800_gDNA | NT | 2324 |
| | 217 | GhExo100 | AA | 381 |
| | 218 | GhExo100_cDNA | NT | 1146 |
| | 219 | GhExo100_gDNA | NT | 3597 |
| Cotton | 220 | GrExo200 | AA | 351 |
| (Gossypium | 221 | GrExo200_cDNA | NT | 1056 |
| raimondii) | 222 | GrExo200_gDNA | NT | 2412 |
| | 223 | GrExo600 | AA | 351 |
| | 224 | GrExo600_cDNA | NT | 1056 |
| | 225 | GrExo600_gDNA | NT | 2384 |
| | 226 | GrExo100 | AA | 339 |
| | 227 | GrExo100_cDNA | NT | 1620 |
| | 228 | GrExo100_gDNA | NT | 2742 |
| Barley | 229 | HvuExo934 | AA | 335 |
| ( Hordeum vulgare) | 230 | HvuExo934_cDNA | NT | 1244 |
| | 231 | HvuExo934_gDNA | NT | 1979 |
| | 232 | HvuExo314 | AA | 342 |
| | 233 | HvuExo314_cDNA | NT | 1143 |
| | 234 | HvuExo314_gDNA | NT | 1368 |
| Millet | 235 | SiExo917 | AA | 336 |
| (Setaria italica) | 236 | SiExo917_cDNA | NT | 1861 |
| | 237 | SiExo917_gDNA | NT | 2853 |
| | 238 | SiExo722 | AA | 342 |
| | 239 | SiExo722_cDNA | NT | 1122 |
| | 240 | SiExo722_gDNA | NT | 1337 |
| Sorghum | 241 | SbExo652 | AA | 337 |
| (Sorghum bicolor) | 242 | SbExo652_cDNA | NT | 1299 |
| | 243 | SbExo652_gDNA | NT | 2399 |
| | 244 | SbExo280 | AA | 361 |
| | 245 | SbExo280_cDNA | NT | 1320 |
| | 246 | SbExo280_gDNA | NT | 2515 |
| Miscanthus sinensis | 247 | MsiExo626 | AA | 335 |
| | 248 | MsiExo626_cDNA | NT | 2192 |
| | 249 | MsiExo626_gDNA | NT | 3368 |
| Switchgrass | 250 | PvExo840 | AA | 335 |
| (Panicum virgatum) | 251 | PvExo840_cDNA | NT | 1340 |
| | 252 | PvExo840_gDNA | NT | 2254 |
| | 253 | PvExo794 | AA | 335 |
| | 254 | PvExo794_cDNA | NT | 1281 |
| | 255 | PvExo794_gDNA | NT | 2192 |
| Tomato | 256 | SlExo685 | AA | 354 |
| (Solanum | 257 | SlExo685_cDNA | NT | 1065 |
| lycopersicum) | 258 | SlExo685_gDNA | NT | 2266 |
| | 259 | SlExo773 | AA | 344 |
| | 260 | SlExo773_cDNA | NT | 1035 |
| | 261 | SlExo773_gDNA | NT | 1860 |
| Cucumber | 262 | CsaExo906 | AA | 335 |
| (Cucumis sativus) | 263 | CsaExo906_cDNA | NT | 1009 |
| | 264 | CsaExo906_gDNA | NT | 4093 |
| | 265 | CsaExo905 | AA | 349 |
| | 266 | CsaExo905_cDNA | NT | 1050 |
| | 267 | CsaExo905_gDNA | NT | 3425 |
| Lettuce | 268 | LsaExo341 | AA | 342 |
| (Lactuca sativa) | 269 | LsaExo341_CDNA | NT | 1139 |
| | 270 | LsaExo341_gDNA | NT | 1797 |
| | 271 | LsaExo501 | AA | 368 |
| | 272 | LsaExo501_cDNA | NT | 1429 |
| | 273 | LsaExo501_gDNA | NT | 3968 |
| Cowpea | 274 | VunExo522 | AA | 324 |
| (Vigna unguiculata) | 275 | VunExo522_cDNA | NT | 1714 |
| | 276 | VunExo522_gDNA | NT | 2469 |
| | 277 | VunExo767 | AA | 376 |
| | 278 | VunExo767_cDNA | NT | 1871 |
| | 279 | VunExo767_gDNA | NT | 4248 |
| Common bean | 280 | PvuExo667 | AA | 348 |
| (Phaseolus vulgaris) | 281 | PvuExo667_cDNA | NT | 1047 |
| | 282 | PvuExo667_gDNA | NT | 2065 |
| | 283 | PvuExo606 | AA | 364 |
| | 284 | PvuExo606_cDNA | NT | 1680 |
| | 285 | PvuExo606_gDNA | NT | 4357 |
| Chickpea | 286 | CariExo974 | AA | 371 |
| (Cicer arietinum) | 287 | CariExo974_cDNA | NT | 1116 |
| | 288 | CariExo974_gDNA | NT | 3022 |
| Carrot | 289 | DcExo204 | AA | 353 |
| (Daucus carota) | 290 | DcExo204_cDNA | NT | 1062 |
| | 291 | DcExo204_gDNA | NT | 1946 |
| | 292 | DcExo043 | AA | 330 |
| | 293 | DcExo043_cDNA | NT | 993 |
| | 294 | DcExo043_gDNA | NT | 1920 |
| Asparagus | 295 | AofExo619 | AA | 241 |
| (Asparagus | 296 | AofExo619_cDNA | NT | 726 |
| officinalis) | 297 | AofExo619_gDNA | NT | 1179 |
| | 298 | AofExo873 | AA | 392 |
| | 299 | AofExo873_cDNA | NT | 1179 |
| | 300 | AofExo873_gDNA | NT | 5965 |
| Potato | 301 | StExo908 | AA | 294 |
| (Solanum tuberosum) | 302 | StExo908_cDNA | NT | 885 |
| | 303 | StExo908_gDNA | NT | 1326 |
| | 304 | StExo299 | AA | 243 |
| | 305 | StExo299_cDNA | NT | 732 |
| | 306 | StExo299_gDNA | NT | 1578 |
| Papaya | 307 | CpExo983 | AA | 349 |
| (Carica papaya) | 308 | CpExo983_cDNA | NT | 1050 |
| | 309 | CpExo983_gDNA | NT | 1896 |
| Quinoa | 310 | CquExo885 | AA | 374 |
| (Chenopodium | 311 | CquExo885_cDNA | NT | 1125 |
| quinoa) | 312 | CquExo885_gDNA | NT | 8980 |
| | 313 | CquExo397 | AA | 298 |
| | 314 | CquExo397_cDNA | NT | 897 |
| | 315 | CquExo397_gDNA | NT | 2292 |
| Apple | 316 | MdoExo563 | AA | 343 |
| (Malus domestica) | 317 | MdoExo563_cDNA | NT | 1032 |
| | 318 | MdoExo563_gDNA | NT | 2332 |
| | 319 | MdoExo873 | AA | 329 |
| | 320 | MdoExo873_cDNA | NT | 990 |
| | 321 | MdoExo873_gDNA | NT | 2143 |
| Orange | 322 | CsExo558 | AA | 354 |
| ( Citrus sinensis) | 323 | CsExo558_cDNA | NT | 1138 |
| | 324 | CsExo558_gDNA | NT | 1790 |
| | 325 | CsExo586 | AA | 353 |
| | 326 | CsExo586_cDNA | NT | 1151 |
| | 327 | CsExo586_gDNA | NT | 2957 |
| | 328 | CsExo938 | AA | 342 |
| | 329 | CsExo938_cDNA | NT | 1118 |
| | 330 | CsExo938_gDNA | NT | 2957 |
| | 331 | PpeExo285 | AA | 354 |
| | 332 | PpeExo285_cDNA | NT | 1330 |
| | 333 | PpeExo285_gDNA | NT | 2177 |
| | 334 | PpeExo452 | AA | 358 |
| | 335 | PpeExo452_cDNA | NT | 2112 |
| | 336 | PpeExo452_gDNA | NT | 3482 |
| Grape | 337 | VvExo476 | AA | 324 |
| (Vitis vinifera) | 338 | VvExo476_cDNA | NT | 1065 |
| | 339 | VvExo476_gDNA | NT | 1714 |
| | 340 | VvExo930 | AA | 341 |
| | 341 | VvExo930_cDNA | NT | 1423 |
| | 342 | VvExo930_gDNA | NT | 8600 |
| Cassava | 343 | MeExo207 | AA | 353 |
| (Manihot esculenta) | 344 | MeExo207_cDNA | NT | 1373 |
| | 345 | MeExo207_gDNA | NT | 2618 |
| | 346 | MeExo168 | AA | 350 |
| | 347 | MeExo168_cDNA | NT | 1289 |
| | 348 | MeExo168_gDNA | NT | 2549 |
| | 349 | MeExo732 | AA | 364 |
| | 350 | MeExo732_cDNA | NT | 1534 |
| | 351 | MeExo732_gDNA | NT | 4700 |
| Cocoa | 352 | TcExo688 | AA | 351 |
| (Theobroma cacao) | 353 | TcExo688_CDNA | NT | 1672 |
| | 354 | TcExo688_gDNA | NT | 4581 |
| | 355 | TcExo453 | AA | 364 |
| | 356 | TcExo453_cDNA | NT | 1522 |
| | 357 | TcExo453_gDNA | NT | 3438 |
| Coffea | 358 | CarExo248 | AA | 350 |
| (Coffea arabica) | 359 | CarExo248_cDNA | NT | 1053 |
| | 360 | CarExo248_gDNA | NT | 1745 |
| | 361 | CarExo637 | AA | 326 |
| | 362 | CarExo637_cDNA | NT | 981 |
| | 363 | CarExo637_gDNA | NT | 1573 |
| | 364 | CarExo658 | AA | 326 |
| | 365 | CarExo658_cDNA | NT | 981 |
| | 366 | CarExo658_gDNA | NT | 1570 |
| Tea | 367 | CsiExo493 | AA | 350 |
| (Camellia sinesis) | 368 | CsiExo493_cDNA | NT | 1337 |
| | 369 | CsiExo617 | AA | 348 |
| | 370 | CsiExo617_cDNA | NT | 1047 |
| | 371 | CsiExo617_gDNA | NT | 1621 |
| Olive | 372 | OeuExo919 | AA | 322 |
| (Olea europaea) | 373 | OeuExo919_cDNA | NT | 969 |
| | 374 | OeuExo919_gDNA | NT | 1448 |
| | 375 | OeuExo061 | AA | 320 |
| | 376 | OeuExo061_cDNA | NT | 963 |
| | 377 | OeuExo061_gDNA | NT | 1553 |
| | 378 | OeuExo751 | AA | 325 |
| | 379 | OeuExo751_cDNA | NT | 978 |
| | 380 | OeuExo751_gDNA | NT | 2491 |
| | 381 | OeuExo749 | AA | 325 |
| | 382 | OeuExo749_cDNA | NT | 978 |
| | 383 | OeuExo749_gDNA | NT | 2492 |
| Poplar | 384 | PtExo733 | AA | 346 |
| (Populus trichocarpa) | 385 | PtExo733_cDNA | NT | 1382 |
| | 386 | PtExo733_gDNA | NT | 2103 |
| | 387 | PtExo157 | AA | 357 |
| | 388 | PtExo157_cDNA | NT | 1457 |
| | 389 | PtExo157_gDNA | NT | 3357 |
| Russian Dandelion | 390 | TksExo465 | AA | 350 |
| (Taraxacum | 391 | TksExo465_cDNA | NT | 1053 |
| kok-saghyz) | 392 | TksExo465_gDNA | NT | 4765 |
| | 393 | TksExo061 | AA | 350 |
| | 394 | TksExo061_cDNA | NT | 1053 |
| | 395 | TksExo061_gDNA | NT | 4040 |
| | 396 | TksExo236 | AA | 350 |
| | 397 | TksExo236_cDNA | NT | 1053 |
| | 398 | TksExo236_gDNA | NT | 4751 |
| | 399 | TksExo535 | AA | 576 |
| | 400 | TksExo535_cDNA | NT | 1731 |
| | 401 | TksExo535_gDNA | NT | 9263 |
| Sunflower | 402 | HanExo211 | AA | 345 |
| (Helianthus annuus) | 403 | HanExo211_cDNA | NT | 1038 |
| | 404 | HanExo211_gDNA | NT | 1582 |
| | 405 | HanExo291 | AA | 323 |
| | 406 | HanExo291_cDNA | NT | 972 |
| | 407 | HanExo291_gDNA | NT | 1507 |
| Petunia axillaris | 408 | PaxExo675 | AA | 356 |
| | 409 | PaxExo675_cDNA | NT | 1202 |
| | 410 | PaxExo675_gDNA | NT | 2480 |
| Arabidopsis thaliana | 411 | GmExo29HDR | NT | 1717 |
| Soybean | 412 | GmExo110HDR | NT | 2092 |
| (Glycine max) | 413 | PGmExo090 | NT | 1901 |
| | 414 | GmAct110 | NT | 1458 |
| | 415 | GmUBC960 | NT | 1490 |
| GPR | 416 | AtBCP-CTP_NT | NT | 186 |
| | 417 | AtBCP-CTP | AA | 63 |
| | 418 | GPR | AA | 518 |
| | 419 | AtBCP-5UTR | NT | 109 |
| | 420 | AtEPSPS-3UTR | NT | 168 |
| | 421 | GPR_NT | NT | 1830 |
| Arabidopsis thaliana | 422 | AtKin960_NT | NT | 2716 |
| | 423 | AtKin960 | AA | 663 |
| GPR | 424 | AtRCA-CTP_NT | NT | 174 |
| | 425 | AtRCA-CTP | AA | 59 |
| | 426 | pGmEF240 | NT | 1953 |
| | 427 | pPVEF2 | NT | 2246 |
| | 428 | Tub-T | NT | 351 |
| GFR | 429 | GFR | NT | 562 |
| | 430 | GFR_AA | AA | 183 |
| | 431 | Rib-T | NT | 325 |
| | 432 | PGmUBC990 | NT | 1384 |
| | 433 | Ubi-T | NT | 267 |
| Bt | 434 | Cry1Ac | AA | 610 |
| | 435 | Cry1Ca | AA | 613 |
| | 436 | Cry3Aa | AA | 644 |
| | 437 | Cry1Ac-NT | NT | 1833 |
| | 438 | Cry1Ca-NT | NT | 1842 |
| | 439 | Cry3Aa-NT | NT | 1935 |
| | 440 | GmUbsc-5UTR | NT | 62 |
| | 441 | GmUbsc-3UTR | NT | 50 |
| | 442 | Cry1AC3A | AA | 1917 |
| | 443 | Cry1AC3A_NT | NT | 5880 |
| | 444 | GmEF630 | NT | 1275 |
| | 445 | GmEF110 | NT | 2032 |
| | 446 | GmAct7 | NT | 2007 |
| | 447 | tGmHS69 | NT | 214 |
| | 448 | tGmH53 | NT | 300 |
| | 449 | tGmHS70 | NT | 343 |
| | 450 | tPs774 | NT | 345 |
| | 451 | tVr027 | NT | 314 |
| Legumes and oligos | 452 | pVaEF670 | NT | 1763 |
| | 453 | pVrEF027 | NT | 1712 |
| | 454 | pPsEF774 | NT | 1562 |
| | 455 | pPsEF893 | NT | 1783 |
| | 456 | pPsEF817 | NT | 1801 |
| | 457 | pVaEF895 | NT | 1749 |
| | 458 | pPcEF357 | NT | 1519 |
| | 459 | pGmTIPs | NT | 1546 |
| | 460 | PGmNTT490 | NT | 1914 |
| | 461 | pGmDOG690 | NT | 2080 |
| | 462 | pVaEF670-F1 | NT | 29 |
| | 463 | pVaEF670-R1 | NT | 32 |
| | 464 | pVrEF027-F1 | NT | 31 |
| | 465 | PVrEF027-R1 | NT | 29 |
| | 466 | pPsEF774-F1 | NT | 29 |
| | 467 | pPsEF774-R1 | NT | 29 |
| | 468 | pPsEF893-F1 | NT | 29 |
| | 469 | pPsEF893-R1 | NT | 31 |
| | 470 | pPsEF817-F1 | NT | 29 |
| | 471 | pPsEF817-R1 | NT | 30 |
| | 472 | pVaEF895-F1 | NT | 29 |
| | 473 | pVaEF895-R1 | NT | 30 |
| | 474 | pPcEF357-F1 | NT | 29 |
| | 475 | pPcEF357-R1 | NT | 28 |
| | 476 | pGmTIPs-F1 | NT | 23 |
| | 477 | pGmTIPs-R1 | NT | 27 |
| | 478 | pGmNTT490-F1 | NT | 36 |
| | 479 | pGmNTT490-R1 | NT | 31 |
| | 480 | pGmDOG690-F1 | NT | 25 |
| | 481 | pGmDOG690-R1 | NT | 31 |
| | 482 | ZmExo846-XbaF1 | NT | 32 |
| | 483 | ZmExo846-BglR1 | NT | 35 |

| Species/Class | SEQ ID NO | Reference | Type | Length |
|---|---|---|---|---|
| Bt | 450 | tPa774 | NT | 345 |
| | 451 | tVr027 | NT | 314 |
| Legumes | 452 | pVaEF670 | NT | 1763 |
| | 453 | PVrEF027 | NT | 1712 |
| | 454 | pPsEF774 | NT | 1562 |
| | 455 | pPsEF893 | NT | 1783 |
| | 456 | pPsEF817 | NT | 1801 |
| | 457 | pVaEF895 | NT | 1749 |
| | 458 | pPcEF357 | NT | 1519 |
| | 459 | pGmTIPS | NT | 1546 |
| | 460 | PGmNTT490 | NT | 1914 |
| | 461 | pGmDOG690 | NT | 2080 |
| | 462 | pVaEF670-F1 | NT | 29 |
| | 463 | pVaEF670-R1 | NT | 32 |
| | 464 | pVrEF027-F1 | NT | 31 |
| | 465 | PVrEF027-R1 | NT | 25 |
| | 466 | pPsEF774-F1 | NT | 29 |
| | 467 | pPsEF774-R1 | NT | 29 |
| | 468 | pPsEF893-F1 | NT | 29 |
| | 469 | pPsEF893-R1 | NT | 30 |
| | 470 | pPsEF817-F1 | NT | 29 |
| | 471 | pPsEF817-R1 | NT | 30 |
| | 472 | PVaEF895-F1 | NT | 29 |
| | 473 | pVaEF895-R1 | NT | 30 |
| | 474 | pPcEF357-F1 | NT | 29 |
| | 475 | pGmEF357-R1 | NT | 28 |
| | 476 | pGmTIPs-F1 | NT | 23 |
| | 477 | pGmTIPs-R1 | NT | 27 |
| | 478 | PGmNTT490-F1 | NT | 36 |
| | 479 | PGmNTT490-R1 | NT | 31 |
| | 480 | pGmDOG690-F1 | NT | 25 |
| | 481 | pGmDOG690-R1 | NT | 31 |

SEQIDNO: 121
CAAGGATTCCCTATATGACCAACGTGTAAAATTTAATATGAAACTATTATTTTTGGTAACTGCTGTTTTTGATAAATATTGTAATCA
ATTGAAGAAATTC
SEQIDNO: 122
ATCTATAAATACCTTCTCACACCTTCTCCATTCTTCACATACTCACACACTCAGCTATCAAGAAGAGAACAAACTCTCTCAACTCT
TTCGTTCTCAAGTATTTGCTTGCAAGTGTCTGATACGTACAATGGATTACCGATCATCAATGGAGTCTTCGGAAACTCTAAGGAA
CAAGTGTGCCGCCTGTTACAGGCAATTCAACAAACTGGAACATTTGGTGGAGCACATGAAGATCTCTTATCATTCGGGTCATGA
ACCTACTTGTGGCGTTTGCAAGAAACATTGCAGGTCTTTTGAGTCCCTCCGAGAACATCTCATAGGGCCATTGCCAAAACAAGA
ATGCAAGAACATTTTCAGCCTTCGTGGATGCAGATTTTGCATGACGATACTCGAAAGCCCGAATTCTCGTAGAATCCATCAAGA
GAGATGCCAATTCTCGAGCGTCAACTCTGGATTGACGACTCGAATGGCAGCTTTAGGCTTAAGAGATAAGGCCATGATCGACTA
CACGTCATCACGGTCTCCAAGAGTGGTTGCACTCTCTTGCAAGATGGTAGGAGGAGGAAGTGACGGGTCGTTGGATCTATGCG
CGAGGGTTTGCATAACGGATGAGAGTGACAACGTTATCTTTCACACGTATGTGAAACCTTCGATGGCCGTGACTAGCTATAGGT
ACGAGACGACAGGGATACGCCCGGAAAATCTAAGGGACGCAATGCCATTAAAACAAGTACAAAGAAAGATTCAAGAGTTTCTTT
GTAATGGAGAACCCATGTGGAAGATTCGTCCAAGAGGTGGAAAAGCGAGGATTCTCGTGGGGCATGGCCTCGATCACGATCTT
GACCGCCTTCAACTTGAATATCCTTCTTCCATGATAAGGGATACTGCGAAATACCCACCGTTGATGAAAACAAGCAAGCTGAGC
AACTCTCTCAAGTACTTAACCCAAGCCTATCTCGGGTATGATGTTCATTTTGGGATACAAGACCCTTATGAAGATTGTGTAGCGA
CGATGAGGCTTTACACGAGAATGAGATATCAGAAACACAAGATTGAAGCTTACCCTTTAGCCGCCGATGCGCAGAACCGTAGCA
ACCAGGTGGCTTGGAGGCAGAGTGAGGCCGAGAGGATGTCTCCTGATGAAATGCTCTCAATCTCTCGTTCCGACTATTACTGC
TGGTGCTTAGACTCACTAGCTTAATTTCTAAACTTATGGGGTTATTTAAGTGGTCTCTTAAAATTAGTAATTCTTCAAACTTTTCCA
GAGATTTTTAATTTAGTAGTGTAATGTCGAATAACATTGGTTATGATTTTGTAGTAGTATCTAAATTTTCGAGTGTGTGTTGTGTGA
GATGCCTAGATTGTTATTGAACTTTGTAATAATGCATTAATCTCAATTATTGATTAATTGACTGCT
SEQIDNO: 123
ATGGATTACCGATCATCAATGGAGTCTTCGGAAACTCTAAGGAACAAGTGTGCCGCCTGTTACAGGCAATTCAACAAACTGGAA
CATTTGGTGGAGCACATGAAGATCTCTTATCATTCGGGTCATGAACCTACTTGTGGCGTTTGCAAGAAACATTGCAGGTCTTTTG
AGTCCCTCCGAGAACATCTCATAGGGCCATTGCCAAAACAAGAATGCAAGAACATTTTCAGCCTTCGTGGATGCAGATTTTGCA
TGACGATACTCGAAAGCCCGAATTCTCGTAGAATCCATCAAGAGAGATGCCAATTCTCGAGCGTCAACTCTGGATTGACGACTC
GAATGGCAGCTTTAGGCTTAAGAGATAAGGCCATGATCGACTACACGTCATCACGGTCTCCAAGAGTGGTTGCACTCTCTTGCA
AGATGGTAGGAGGAGGAAGTGACGGGTCGTTGGATCTATGCGCGAGGGTTTGCATAACGGATGAGAGTGACAACGTTATCTTT
CACACGTATGTGAAACCTTCGATGGCCGTGACTAGCTATAGGTACGAGACGACAGGGATACGCCCGGAAAATCTAAGGGACGC
AATGCCATTAAAACAAGTACAAAGAAAGATTCAAGAGTTTCTTTGTAATGGAGAACCCATGTGGAAGATTCGTCCAAGAGGTGGA
AAAGCGAGGATTCTCGTGGGGCATGGCCTCGATCACGATCTTGACCGCCTTCAACTTGAATATCCTTCTTCCATGATAAGGGAT
ACTGCGAAATACCCACCGTTGATGAAAACAAGCAAGCTGAGCAACTCTCTCAAGTACTTAACCCAAGCCTATCTCGGGTATGAT
GTTCATTTTGGGATACAAGACCCTTATGAAGATTGTGTAGCGACGATGAGGCTTTACACGAGAATGAGATATCAGAAACACAAG
ATTGAAGCTTACCCTTTAGCCGCCGATGCGCAGAACCGTAGCAACCAGGTGGCTTGGAGGCAGAGTGAGGCCGAGAGGATGT
CTCCTGATGAAATGCTCTCAATCTCTCGTTCCGACTATTACTGCTGGTGCTTAGACTCACTAGCTTAA
SEQIDNO: 124
MDYRSSMESSETLRNKCAACYRQFNKLEHLVEHMKISYHSGHEPTCGVCKKHCRSFESLREHLIGPLPKQECKNIFSLRGCRFCMTI
LESPNSRRIHQERCQFSSVNSGLTTRMAALGLRDKAMIDYTSSRSPRVVALSCKMVGGGSDGSLDLCARVCITDESDNVIFHTYVKP
SMAVTSYRYETTGIRPENLRDAMPLKQVQRKIQEFLCNGEPMWKIRPRGGKARILVGHGLDHDLDRLQLEYPSSMIRDTAKYPPLMK
TSKLSNSLKYLTQAYLGYDVHFGIQDPYEDCVATMRLYTRMRYQKHKIEAYPLAADAQNRSNQVAWRQSEAERMSPDEMLSISRSD
YYCWCLDSLA
SEQIDNO: 125
HQERCQFSSVNSGLTTRMAALGLRDKAMIDYTSSR
SEQIDNO: 126
ATCTATAAATACCTTCTCACACCTTCTCCATTCTTCACATACTCACACACTCAGCTATCAAGAAGAGAACAAACTCTCTCAACTCT
TTCGTTCTCAAGTATTTGCTTGCAAGTGTCTGATACGTACA
SEQIDNO: 127
TTTCTAAACTTATGGGGTTATTTAAGTGGTCTCTTAAAATTAGTAATTCTTCAAACTTTTCCAGAGATTTTTAATTTAGTAGTGTAAT
GTCGAATAACATTGGTTATGATTTTGTAGTAGTATCTAAATTTTCGAGTGTGTGTTGTGTGAGATGCCTAGATTGTTATTGAACTT
TGTAATAATGCATTAATCTCAATTATTGATTAATTGACTGCT
SEQIDNO: 128
AACTACTTGATGTGGTTTACGCCATTGTTGGTATTCTTGTGTATATAAAATGATTTTTTTTTCTTAGTACATGTACATACAAACTTC
ATTTTTTCAACAAAAAAACAAATTTTAGTGTATTGAAGGCTTTTTAAAAATTCGAAAATGAAGTGAATGATGTAAGAACATTTTCTA
ATATTTTAGAGATTATTCATAAACCTTTTATTGGTATTTTTGAAAGTTATATAAACAATCGTAATTGCTTGATGGTTTGTATTTTTGA
TCCTTTGTATTTTTATGTGAGCCTTTGTATATTTGTTTTTCTTCCCTACACCTACTTAGTGTTGGCTAGCTAGTTATCTGTGTGAGA
TTTTCTTGTTTATAAACTTGATCGACATCACATTTTCACACACACACGTGCATACAATAATAGCATCTTCGTTATCGTCCAAAACAA
ATGACAACTAAAAATTATGATTCCTTTTACCATGAAAAGCGACCCCATCGCATTAAGGCATCTACTTCAATTTCTGTTCGTCTCTA
ACGGTCATATATGAGAATGGTCAGCTTTGCTTTTCTTCATCCTGCTTTTATGAATATTCATCTATAAATACCTTCTCACACCTTCTC
CATTCTTCACATACTCACACACTCAGCTATCAAGAAGAGAACAAACTCTCTCAACTCTTTCGTTCTCAAGTATTTGCTTGCAAGTG
TCTGATACGTACA
SEQIDNO: 129
TGCTTGCAAGTGTCTGATACGTACAATGGATTACCGATCATCAATGGAGTCTTCGGAAACTCTAAGGTAACTATTTTCATGGCCT
ACGCCTATAATACCAAACCATAATTCCATCAAAAACTCCAAGAGAAGACTAATGGAGCTAGTGGCATGCAATATCATATCCAAAT
TCTTGATTCAAGTGATGAAAAACCAAAACTAAGTTTTATTGATTTGAATGTATATACATGTCAATGTACAGGAACAAGTGTGCCGC
CTGTTACAGGCAATTCAACAAACTGGAACATTTGGTGGAGCACATGAAGATCTCTTATCATTCGGGTCATGAACCTACTTGTGGC
GTTTGCAAGAAACATTGCAGGTCTTTTGAGTCCCTCCGAGAACATCTCATAGGTAAATAATAGCCTCTATAAACTTTTCATATATA
TAGATATATAGCATTTCATATACACACTTTGTATATGAAAGCTTTTATAAATTTTGTTATCTCTATATAGGGCCATTGCCAAAACAA
GAATGCAAGAACATTTTCAGCCTTCGTGGATGCAGATTTTGCATGACGATACTCGAAAGCCCGAATTCTCGTAGAATCCATCAA
GAGAGATGCCAATTCTCGAGCGTCAACTCTGTAATCCTCTTTTTCATATTTATATAATTAAACTTTTAACCTATATGAATCGAACGC
AAGAATATATACTTATTCAAATCATATGATTTTCTCATTTTCAGGGATTGACGACTCGAATGGCAGCTTTAGGCTTAAGAGATAAG
GCCATGATCGACTACACGTCATCACGGTCTCCAAGAGTGGTTGCACTCTCTTGCAAGATGGTAGGAGGAGGAAGTGACGGGTC
GTTGGATCTATGCGCGAGGGTTTGCATAACGGATGAGAGTGACAACGTTATCTTTCACACGTATGTGAAACCTTCGATGGCCGT
GACTAGCTATAGGTACGAGACGACAGGGATACGCCCGGAAAATCTAAGGGACGCAATGCCATTAAAACAAGTACAAAGAAAGA
TTCAAGAGTTTCTTTGTAATGGAGAACCCATGTGGAAGATTCGTCCAAGAGGTGGAAAAGCGAGGATTCTCGTGGGGCATGGC
CTCGATCACGATCTTGACCGCCTTCAACTTGAATATCCTTCTTCCATGATAAGGTTGACATTTATATTTAAGAAAATAAATAAAGA
AAATACATATAACAAGATTCTTTAGTGTTACTTCTCTTTCGATATAACATATGATTTTATGTGAGTTTATATGTTAATGGTGAAGTTT
AATGTTTGTATGTAGGGATACTGCGAAATACCCACCGTTGATGAAAACAAGCAAGCTGAGCAACTCTCTCAAGTACTTAACCCAA
GCCTATCTCGGGTAATAATATTATTTTTTGGTATTATAATATATTGAATCAAATAAACTAATTTGGAAATTGTGTATATATGCATGC
ACTCGTATGTTGATACAATATATGTGTATAAATGATTACTTTTTGATGATGAGGGTATTGATGCTTGTATGGGTTTAAAGTTATAAG
GAAGAGTTTCAAAACGTGAAAAGATTCACTGTTTAATAATACATTAATCTCTATATATATCTACACACATATACATATATGGATTGT
ATATGACTAGCACCAAAATCGTTAAGACATTTTTATTTTACATGAGATGCTTATTATATTCAAGATTATATGTTAATAAATGATGTG
TTTATATAGGTATGATGTTCATTTTGGGATACAAGACCCTTATGAAGATTGTGTAGCGACGATGAGGCTTTACACGAGAATGAGA
TATCAGAAACACAAGATTGAAGCTTACCCTTTAGCCGCCGATGCGCAGAACCGTAGCAACCAGGTGGCTTGGAGGCAGAGTGA
GGCCGAGAGGATGTCTCCTGATGAAATGCTCTCAATCTCTCGTTCCGACTATTACTGCTGGTGCTTAGACTCACTAGCTTAATTT
CTAAACTTATGGGGTTATTTAAGTGGTCTCTTAAAATTAGTAATTCTTCAAACTTTTCCAGAGATTTTTAATTTAGTAGTGTAATGT
CGAATAACATTGGT
SEQIDNO: 130
MDYRLLMDSSETLRNKCGGCYRQFNKKEHLVEHMRISYHSVHEPTCGICNKHCRSFDSLREHLIGPLPKQECKNIFSIRGCRFCLTIL
ESPNARRIHQERCQLSNVTSGLMIRMAALGLRNNSTIDYTSSRSPRVVALSCKMVGGGSDGSLDLCARVCITDESENVVFHTYVKPTI
PVTNYRYEMTGIRPENLRDAMRLKHAQRKVQEFLCNGEPMWKIRPRNGKARILVGHGLDNHLDSLQLEYSSSMIRDTAEYPPLMKSS
KLSNSLKYLTQAYLGYDIHVGIQDPYEDCVATMRLYTRMRYQKHRAEAYPLASDTQNHNNFAAWRQNELERMSPEELLDLSRSDYY
CWCLDSVA
SEQIDNO: 131
CAAAAAAAAACAAAGAAGATTAAACCTGTTTAATCAAATTCTCCTGATTAACGCAACATATTTGAGGTTGCTGTTATTTACTATGG
ACTACAGATTGTTAATGGATTCCTCAGAAACCCTAAGGAACAAGTGTGGAGGGTGTTATAGGCAATTCAACAAGAAGGAGCACT
TGGTGGAACACATGAGGATCTCTTATCATTCGGTTCATGAACCTACTTGTGGTATTTGCAACAAACATTGCCGATCTTTTGACTC
CCTCCGTGAACATCTCATTGGGCCATTGCCGAAACAAGAATGTAAGAACATTTTCAGCATTCGCGGCTGCAGATTCTGTCTTAC
GATCCTCGAAAGCCCCAACGCTCGTAGAATCCATCAAGAGAGATGCCAGCTCTCAAACGTCACTTCTGGATTAATGATTCGTAT
GGCGGCCTTAGGCCTAAGAAACAACTCAACAATTGACTACACTTCTTCGAGGTCACCTCGAGTGGTGGCACTCTCATGCAAGAT
GGTTGGAGGAGGCAGTGACGGATCGCTTGACCTATGCGCAAGAGTTTGCATTACGGATGAGAGCGAAAATGTTGTGTTCCACA
CGTATGTGAAGCCAACGATACCCGTAACGAATTATAGGTATGAGATGACAGGGATTCGACCTGAAAATCTAAGGGACGCAATGC
GATTAAAGCACGCACAGAGAAAGGTTCAAGAGTTTCTTTGTAATGGAGAACCAATGTGGAAGATTCGTCCAAGAAATGGGAAAG
CAAGGATTCTCGTTGGACATGGACTTGATAACCATCTTGACTCTCTTCAACTTGAATATTCTTCCTCTATGATAAGAGATACTGCG
GAATACCCTCCATTGATGAAATCAAGCAAGCTAAGCAACTCTCTCAAGTACTTAACCCAAGCCTATCTCGGTTATGATATTCATG
TGGGAATACAAGATCCTTACGAGGACTGTGTCGCGACAATGAGGCTATACACGAGAATGCGATATCAGAAACACAGGGCCGAG
GCCTATCCGCTGGCCTCGGACACGCAGAACCACAATAACTTTGCGGCGTGGAGGCAGAATGAACTAGAGAGGATGTCTCCAGA
GGAGTTGCTCGACCTTTCACGTTCAGACTATTACTGCTGGTGCTTGGACTCGGTTGCTTGAAAAAGAAAGTTATACTGATGGTG
CTTGATCATCTCCGAAAAATAAGATGCATGCGAGGATATATTTAGTAAAGTATAATTGAAAATCGAATAAACATTATCTTTATTAGT
GATTGTGGTGGTAATTTGGCATTCTTGTATCATCTATGTTACATGTAATTGTAACTCATGCATGGTTATGTACTTCATACGCG
SEQIDNO: 132
ACATATTTGAGGTTGCTGTTATTTACTATGGACTACAGATTGTTAATGGATTCCTCAGAAACCCTAAGGTATTTATCTATATTAGA
GTAAAATCTTGTGTTTCTTTGATATAATTGTACCACCATTGGTGTACGCATTTTTTCTATTACCACCGACATCTAATGATATCGAAT
ATGTATGCATAAAACTCTTTCAAACATGAACAATACGTAATCTTAACTAGGTAAATTTGTAATTTACTAATCTAGTGCGAAACCGTA
TCTAAAATATATATAAAGTATAAATTATTATTAAAAACATATGGATACATGCAGGAACAAGTGTGGAGGGTGTTATAGGCAATTCA
ACAAGAAGGAGCACTTGGTGGAACACATGAGGATCTCTTATCATTCGGTTCATGAACCTACTTGTGGTATTTGCAACAAACATTG
CCGATCTTTTGACTCCCTCCGTGAACATCTCATTGGTATATATATCTCTAACCTAGTTCATAACTTGTCTTTAATATTTCACTTTTC
CTCATTTCATTTTGGGTCATATCGTACATAGGGCCATTGCCGAAACAAGAATGTAAGAACATTTTCAGCATTCGCGGCTGCAGAT
TCTGTCTTACGATCCTCGAAAGCCCCAACGCTCGTAGAATCCATCAAGAGAGATGCCAGCTCTCAAACGTCACTTCTGTATATAT
CATCTTCACATATATGAAATAACCATCGTATACATGTCATAATTATTTCTTCTTCAATGTATATTTAATCTTGCATTTAAACATTACT
AAAATATATATATTAAAATTTAAAATACTAAAAACGACCTTATTTAAAAAATCATTAGTATTAAACGTAAATGCATATAGATAATATA
TAATCTAATATTTTTACTGATATTTTAGGGATTAATGATTCGTATGGCGGCCTTAGGCCTAAGAAACAACTCAACAATTGACTACA
CTTCTTCGAGGTCACCTCGAGTGGTGGCACTCTCATGCAAGATGGTTGGAGGAGGCAGTGACGGATCGCTTGACCTATGCGCA
AGAGTTTGCATTACGGATGAGAGCGAAAATGTTGTGTTCCACACGTATGTGAAGCCAACGATACCCGTAACGAATTATAGGTAT
GAGATGACAGGGATTCGACCTGAAAATCTAAGGGACGCAATGCGATTAAAGCACGCACAGAGAAAGGTTCAAGAGTTTCTTTGT
AATGGAGAACCAATGTGGAAGATTCGTCCAAGAAATGGGAAAGCAAGGATTCTCGTTGGACATGGACTTGATAACCATCTTGAC
TCTCTTCAACTTGAATATTCTTCCTCTATGATAAGGTAAATAAATACTTTTACTAGAAACACTAATTTCTTAAGTTATATAATGTTTG
GTTTTTAGTCTATAATCTATGGTCATAAATAAAAGTGAAAAAAAAAATATGTGATAAGAAAGATATTGACCGTTTTAACTCTTTATC
AAAAGAAATAAAAGATACTGACCATTTTCAACTTTAGTATCATTAATCCTTTCGTGTAAGAACCCTATCGATATACTATTAAATACA
CTATGGATATTGACCGTTTAGTTTTTAAACTAAATACACTATTTTTTGCTGAACTGAATTTCATATAGATGATAAAAAGAAATTGTA
AACCAAGACGATTTTTTTTTTTGTTTTTGTTTTCCTAACCGCTGATTTATATACAATTCATATGTATATAGTGGGAATTTTACAATTA
TATCAATTATTTTTGTTGTTGTTAATAGAGATACTGCGGAATACCCTCCATTGATGAAATCAAGCAAGCTAAGCAACTCTCTCAAG
TACTTAACCCAAGCCTATCTCGGGTAATGTTTTTTTTTTTTTACATTTCCATAGTATACAAACTGACATTGTCATATTGGATATCAT
AAATTATTGAAAATCTATTGATCAGACTTTAAAATGTTCCATGATAATTTAAAAAATATTCAACTTGAAAACAAAATAGTTCATCTAC
TAAACCATGCATATACTTTTCAAAAAAAGAAAACAAATCTTGTGTGATATTCGGACGCAACAACTATAAGCTAGTAAAGAAGGTAT
CCGATTTTTGACATGATTAAAAGTTATTAATCACCGTATAAAGTACGACATGCGTATTAGCTTAAAAAGTTTCTTAAGAATTCGAAT
AAAATCAACCGATGATAATCCTAAGAATATCTCGTCCATATCAAAGTTCGATTTGTCTGTCTCTACTCTCTACCTCATATTTTATAT
TATTGTGATTCATAACCAAAAGTTCGTATGTCTTATTTTGTTCCCCTCCTACCTATAAGGTTTTCCAAAAATACTTTCATACACAAA
TTGCAATTTTAATTTTTCTAAGAAATACAAATCTTTAACTGGGATTAATATGAAAAATAGTCGAATCTTTCAAACTAAAGAAATATA
CTTTTTAGTTTACGTTAGTGTCAATGATTTCGTTTTTAGAGCTAGGTTGAGTTTAACAGGTTTGTTTTAGATTAGAGTTTAGAATTC
ATCAGTTATATTTTAAAATAGTACTTTAACTAAAACAATCTAGAATAATTGCGGTTCTTGTAGTAATTTACTAATTTTCAACTTCCTT
GGCTTTGTAAAGTTATGATATTCATGTGGGAATACAAGATCCTTACGAGGACTGTGTCGCGACAATGAGGCTATACACGAGAAT
GCGATATCAGAAACACAGGGCCGAGGCCTATCCGCTGGCCTCGGACACGCAGAACCACAATAACTTTGCGGCGTGGAGGCAG
AATGAACTAGAGAGGATGTCTCCAGAGGAGTTGCTCGACCTTTCACGTTCAGACTATTACTGCTGGTGCTTGGACTCGGTTGCT
TGAAAAAGAAAGTTATACTGATGGTGCTTGATCATCTCCGAAAAATAAGATGCATGCGAGGATATATTTAGTAAAGTATAATTGAA
AATCGAATAAACATTATCTTTATTAGTGATTGTGGTGGTAATTTGGCATTCTTGTATCATCTATGTTACATGTAATTGTAACTCATG
CATGGTTATGTACTTCATACGCGTCTGTGT
SEQIDNO: 133
MDYRSSMESSETLRNKCAACYRQFNKMEHLVEHMKISYHSGHEPTCGVCKKHCRSFESLREHLIGPLPKQECKNIFSLRGCRFCMM
ILESPNARRIHQERCQFSSVNAGLTTRMAALGLRDKAMIDYTSSRSPKMVALSCKMVGGGSDGSLDLCARVCITDENDNVVFHTYVK
PSMVVTNYRYETTGIRPENLRDAMPLKHAQRKIQEFLCNGEPMWKIRPRGGKGRILVGHGLDHDLDRLQLEYPSSMMRDTAKYPPL
MKTSKLSNSLKYLTQAYLGYDIHVGIQDPYEDCVATMRLYTRMRYQKHKIEAYPLPADVQNRSNQVAWRQSEVERMSPNEMLSISRS
DYYCWCLDSLA
SEQIDNO: 134
GCATAATACATTAATAAAAAAACTCATCAAAAGAATTGTTTAACTTCTCCCCACTCTTAAATTGTTGAGTTCTTTGTTTGCATTTTC
ATACGTACCATGGATTACAGATCATCTATGGAGTCATCGGAAACCCTAAGGAACAAGTGCGCAGCTTGTTATAGGCAATTCAAC
AAAATGGAACATTTGGTGGAACACATGAAGATCTCTTATCACTCCGGTCATGAGCCTACTTGTGGGGTTTGCAAGAAACATTGC
CGATCTTTTGAGTCACTCCGCGAACATCTCATAGGACCATTGCCAAAACAAGAATGCAAGAACATTTTTAGCCTTCGOGGATGC
AGATTCTGCATGATGATCCTCGAAAGCCCTAACGCTCGTAGGATTCATCAAGAGAGATGCCAATTTTCGAGCGTCAATGCTGGA
TTGACGACTCGTATGGCAGCGTTAGGCCTTAGAGATAAAGCCATGATCGACTACACGTCATCACGGTCTCCAAAAATGGTTGCA
CTCTCTTGCAAGATGGTAGGAGGAGGAAGCGACGGGTCGTTGGATCTATGCGCAAGGGTTTGCATAACGGATGAGAACGACAA
CGTTGTGTTCCACACGTACGTGAAACCGTCAATGGTCGTGACGAACTATAGGTACGAGACGACCGGTATACGTCCAGAGAATC
TGAGGGACGCAATGCCGTTGAAACATGCACAAAGAAAGATTCAAGAATTTCTTTGTAATGGAGAACCCATGTGGAAGATTCGTC
CAAGAGGTGGGAAAGGGAGGATTCTCGTGGGACATGGGCTGGATCACGATCTTGACCGCCTTCAACTTGAATATCCTTCTTCC
ATGATGAGGGATACTGCAAAATATCCTCCGTTGATGAAAACAAGCAAGCTGAGCAATTCTCTCAAGTACTTAACCCAAGCCTATC
TCGGGTATGATATTCATGTTGGGATACAAGACCCATACGAAGATTGTGTAGCGACGATGAGGCTTTACACGAGAATGAGATATC
AGAAACATAAGATTGAAGCATATCCTTTACCAGCCGACGTGCAGAACCGTAGCAATCAAGTGGCTTGGAGGCAGAGCGAGGTC
GAAAGGATGTCTCCTAATGAAATGCTCTCCATCTCTCGCTCCGACTACTATTGCTGGTGCTTGGACTCCCTCGCTTAATTCCAAA
AACTATGGGGTTAAAATTTGAGAATCTCTCATAATTACTTCATAAACTTTTTCGAGATTTTTAATTTAGTAGCGTAAAGTCGAATAA
GCATTACTTCTGATTTCAAATAGTATCTAAATTAATTTTATAGTATGTGTCGTGTGAGATGCGAATGTTGTTCCTGTACTTCTAATA
ACGCATATTGCTCTTAATTATTAATAATTATTGTTTTTTAAAAATTAATTAGTAATCACTTGTTAGCTTTTGTGTATAAATATATCTAT
ATTTGTCTTAGAA
SEQIDNO: 135
ATGGATTACAGATCATCTATGGAGTCATCGGAAACCCTAAGGTAACCATTTTCATCCTAAGCGTGTGTTATATCAAGCGTTTTAAT
TGAAAAAAAAATCCCAAAGAAAAACTCAATGGAGTGGCATGCAATATCATACCCAAATTCTGTGGTCAACTGATGAAAAATTAAG
ACTAAAATTATTTTTTTTTCTAAAATATATTTGTATATATATGTTAAAAATATATTGATGTATATATGTACACGTACAGGAACAAGTG
CGCAGCTTGTTATAGGCAATTCAACAAAATGGAACATTTGGTGGAACACATGAAGATCTCTTATCACTCCGGTCATGAGCCTACT
TGTGGGGTTTGCAAGAAACATTGCCGATCTTTTGAGTCACTCCGCGAACATCTCATAGGTAAATAAGAAGCTATATAAAAAGAGT
GACATATAGTTTTATATATACGCTATGCATTTGTATGTTAATTTTTAATTGTGTAATGTCAATAGGACCATTGCCAAAACAAGAATG
CAAGAACATTTTTAGCCTTCGCGGATGCAGATTCTGCATGATGATCCTCGAAAGCCCTAACGCTCGTAGGATTCATCAAGAGAG
ATGCCAATTTTCGAGCGTCAATGCTGTACGTAATCGTATTATTGCCCTTATCTCAATACTCCTCTTCTCATATTTGCGTAACTAAA
CTTGTAAATTGACCACATGAAAAAAATAATTCTTATATAAATAATGTAATATCATATGATTTGTCTTTTTCAGGGATTGACGACTCG
TATGGCAGCGTTAGGCCTTAGAGATAAAGCCATGATCGACTACACGTCATCACGGTCTCCAAAAATGGTTGCACTCTCTTGCAA
GATGGTAGGAGGAGGAAGCGACGGGTCGTTGGATCTATGCGCAAGGGTTTGCATAACGGATGAGAACGACAACGTTGTGTTC
CACACGTACGTGAAACCGTCAATGGTCGTGACGAACTATAGGTACGAGACGACCGGTATACGTCCAGAGAATCTGAGGGACGC
AATGCCGTTGAAACATGCACAAAGAAAGATTCAAGAATTTCTTTGTAATGGAGAACCCATGTGGAAGATTCGTCCAAGAGGTGG
GAAAGGGAGGATTCTCGTGGGACATGGGCTGGATCACGATCTTGACCGCCTTCAACTTGAATATCCTTCTTCCATGATGAGGTG
ACATTTCTATAAAGAAGAAAAGTAAAGAGGACACATATATATAACTAGATTCCTTATAGTGTTACTTGGTTTCTCGCAACACAACC
CAGACTTTACGTGAGTTGTTTTACGATTAACGTGAATTTCTAATATCATTTTTATATATTGGTGTGTGTAGGGATACTGCAAAATAT
CCTCCGTTGATGAAAACAAGCAAGCTGAGCAATTCTCTCAAGTACTTAACCCAAGCCTATCTCGGGTAATATATCTACTTTTGTG
TTTGTAATACAACTTTCGAATATAACATTAATTTGGAAAATGAATATAGATATTTGCATACTTTACGTGTATTGATACATAAGTGTA
TCATGTACTATCCATTAATTTTTTTGGTGATGTATGGGTATTGATGCTTTGTATGGGCTTAAAGCTAAAAGGAAGGGATTCAAAAC
GTGAAAAGATTCATATGTTATATAATATAACCATTTTCTAACAAAAACAAAAAGAATTTACATAGTTGGAGATTTTTAATTTACATG
AGATGCTTACTAGCGTAACTTTTTATCTCCAAGTTGACTAAATCAACCTATTTATTTCATTTTATTTCCTATCAATTACAAATAGTTC
AACTAGTATACCATTGTTTTGTATGTAAAATTATAGGGATGAGTGTGTATGCCTAATATCATATGTTCCATATAATCTGTGTTGGC
ACCGTAGAAGTAATCTAAAACACTTGAGATCAATTAATTATACCCATTATCTAATGTACAACAATATATATATATTAAGGATGGTAT
TGATGTGCTTATAGGTATGATATTCATGTTGGGATACAAGACCCATACGAAGATTGTGTAGCGACGATGAGGCTTTACACGAGA
ATGAGATATCAGAAACATAAGATTGAAGCATATCCTTTACCAGCCGACGTGCAGAACCGTAGCAATCAAGTGGCTTGGAGGCAG
AGCGAGGTCGAAAGGATGTCTCCTAATGAAATGCTCTCCATCTCTCGCTCCGACTACTATTGCTGGTGCTTGGACTCCCTCGCT
TAATTCCAAAAACTATGGGGTTAAAATTTGAGAATCTCTCATAATTACTTCATAAACTTTTTCGAGATTTTTAATTTAGTAGCGTAA
AGTCGAATAAGCATTACTTCTGATTTCAAATAGTATCTAAATTAATTTTATAGTATGTGTCGTGTGAGATGCGAATGTTGTTCCTGT
ACTTCTAATAACGCATATTGCTCTTAATTATTAATAATTATTGTTTTTTAAAAATTAATTAGTAATCACTTGTTAGCTTTTGTGTATAA
ATATATCTATATTTGTCTTAGAA
SEQIDNO: 136
MDCRSSMESSETLRNKCAACYKQFNKLEHLVEHMKISYHSGHEPMCGVCKKHCRSFESLREHLIGPLPKQECKNIFSFRGCRFCLMI
LETPNARRIHQERCQFSSVNAGLTTRMAALGVRDKAMIDYTSSRSPKVVALSCKMVGGGSDGSLDLCARVCITDESDNVVFHTYVKP
SMPVTNYRYEKTGIRPENLRDAMPLKHAQRKIQEFLCNGEPMWKIRPRGGKGRILVGHGLDHDLDRLQLEYPSSMIRDTAKYPPLMK
TSKLSNSLKYLTQAYLGYDVHVGIQDPYEDCVATMRLYTRMRYQKHKIEAYPLAADAHNRSNQVAWRQNEFERMSPDEMLSISRSD
YCCWCLDSLA
SEQIDNO: 137
ACACATCTATAATACAAAAAGGATCATCAAAACAGTTGTTTAAACTCTCTCATCTCTCAAGTTGCTACGTTTTTGTTTGTATTTTCC
GATACGTACCATGGATTGCAGATCATCTATGGAGTCATCGGAAACCCTAAGGAACAAGTGCGCAGCTTGTTATAAACAATTCAA
CAAATTAGAACATTTAGTGGAGCACATGAAGATCTCGTATCACTCCGGTCATGAGCCTATGTGTGGCGTTTGCAAGAAACATTG
CCGATCTTTTGAGTCCCTCCGGGAACATCTCATAGGGCCATTGCCAAAACAAGAATGCAAGAACATTTTCAGCTTTCGCGGATG
CAGATTCTGCTTGATGATCCTCGAAACCCCGAACGCTCGTAGGATCCATCAAGAGAGATGCCAATTTTCGAGCGTCAATGCTGG
ATTGACGACTCGTATGGCGGCCTTAGGCGTAAGAGATAAGGCCATGATCGACTACACGTCGTCTAGATCCCCAAAAGTGGTTG
CACTCTCTTGCAAGATGGTAGGAGGGGGAAGCGACGGGTCGCTGGATCTATGCGCAAGGGTTTGCATAACGGATGAGAGCGA
CAACGTTGTTTTCCATACGTACGTGAAACCGTCAATGCCCGTGACGAACTATAGGTATGAGAAGACCGGCATACGTCCGGAGAA
TCTAAGGGACGCAATGCCGTTGAAACATGCACAAAGAAAGATTCAAGAGTTTCTTTGTAATGGAGAACCCATGTGGAAGATTCG
TCCAAGAGGTGGGAAAGGGAGGATTCTCGTGGGACATGGCCTCGATCACGATCTTGACCGCCTTCAACTTGAATATCCTTCTTC
CATGATAAGGGATACTGCGAAATACCCTCCGTTGATGAAAACAAGCAAGCTGAGCAATTCCCTCAAGTACTTGACCCAAGCCTA
TCTCGGGTATGATGTTCATGTTGGGATACAAGACCCATACGAAGATTGTGTAGCGACGATGAGGCTTTACACGAGAATGAGATA
TCAGAAACACAAGATTGAAGCTTATCCTTTAGCTGCCGACGCGCACAACCGTAGCAATCAAGTGGCTTGGAGGCAGAACGAGT
TCGAGAGGATGTCTCCTGATGAAATGCTTTCCATCTCTCGATCCGACTACTGTTGCTGGTGCTTGGACTCCCTCGCCTGATTTCT
AAAACTATGGGGTTAAGTTGAGGAATTTCACATAATAACTTCGTAAACTTTTTCAAGATATTAAATTTAGTAGCGTAATGTCGAAT
AAGAATCAGTTGTTATTTTTAATATATACTAGTATCTAAATTTTATAGTATGTGTCGTGTGAGACGCATAAATTGTTACTGTACTTG
TAATAATGCATTGCTTTTCAATGATTA
SEQIDNO: 138
ATGGATTGCAGATCATCTATGGAGTCATCGGAAACCCTAAGGTAACCTATCTTCCATCGTACGTGTATTATATTATATCAAGCGT
TTATATGAAAATATCGAAAAGAACTCATGGAGGATGTCATCCAGTATCACACCCAAATTCTATAATCAATTGATGAAAAATAAGAA
ATAAAGTTTTTCTTAATTTATAGTTTTTATACATATGTACACGCACGTGCAGGAACAAGTGCGCAGCTTGTTATAAACAATTCAAC
AAATTGGAACATTTAGTGGAGCACATGAAGATCTCGTATCACTCCGGTCATGAGCCTATGTGTGGCGTTTGCAAGAAACATTGC
CGATCTTTTGAGTCCCTCCGGGAACATCTCATAGGTAAATGATAAGCTATATATATTAAGAGAAATATATCGTTTTATATATTCAC
GACGCATATGTGTATTTATTTTTTATTGTGCTATATTATTAGGGCCATTGCCAAAACAAGAATGCAAGAACATTTTCAGCTTTCGC
GGATGCAGATTCTGCTTGATGATCCTCGAAACCCCGAACGCTCGTAGGATCCATCAAGAGAGATGCCAATTTTCGAGCGTCAAT
GCTGTAATCTTTTCTTCTAATATTTGCGCAAATTAAAATTGTTAATAATCAACCGCATAACAATATATTCTTACATATTTTCTATGTA
TCAGGGATTGACGACTCGTATGGCGGCCTTAGGCGTAAGAGATAAGGCCATGATCGACTACACGTCGTCTAGATCCCCAAAAG
TGGTTGCACTCTCTTGCAAGATGGTAGGAGGGGGAAGCGACGGGTCGCTGGATCTATGCGCAAGGGTTTGCATAACGGATGA
GAGCGACAACGTTGTTTTCCATACGTACGTGAAACCGTCAATGCCCGTGACGAACTATAGGTATGAGAAGACCGGCATACGTC
CGGAGAATCTAAGGGACGCAATGCCCTTGAAACATGCACAAAGAAAGATTCAAGAGTTTCTTTGTAATGGAGAACCCATGTGGA
AGATTCGTCCAAGAGGTGGGAAAGGGAGGATTCTCGTGGGACATGGCCTCGATCACGATCTTGACCGCCTTCAACTTGAATAT
CCTTCTTCCATGATAAGGTGGCATTTCTATAAAGAAAAAAAAAATATAAAGAGGATATATACGTATATAACTAGATTCCTTTAGTG
TTACTTGAAATCTTTCAATATAGCCCATGATTTTATGTGTGTTTTTTATATGACGGGATTTTGTATCATTTTATTGCTGTATGTAGG
GATACTGCGAAATACCCTCCGTTGATGAAAACAAGCAAGCTGAGCAATTCCCTCAAGTACTTGACCCAAGCCTATCTCGGGTAA
TATATCTAATTTTGTTTTTGTAATAATATTTTCGAACCTAACACATTAATTTGGAAAATGATTATAGATGCATGCATACATTACCTAT
ATTGATACACATATATATCATAATAGGTGGGTATTGATGTTTGTATGGGCTTAAATGGGAGGGCTTCAAAACGTAAGATTTACAT
GTTTTCAAATATATTCATTTCAAAATTTACACATAAACATATATACTTTGTGTGATTAGAACTATCATTGAAGTAAATAAAATGAAAT
CATTATAACAAAAAGGAATTTACATGGTTAGAAATTTTACTTTACCCTAGATACTTAATACTTATTAGCGTAGATTTTCCTTACATC
AACCTGTTTATTTCATTTTCTTTTCTTTTTAACGCAAATATATAGTTCCAATAGTATTTACCCTTGTTTTCTGTATGTAAAATTTTAG
GGATGAGTAGTGTGTATGCCTCATACCATATGTTCCATATATAATCTATGTTCGTGTCTACCAACCGTATAAGTAATCTAAAACAC
TTGAGATCAATTATATACACATTAATTGTCTAATGTTCAAGAATCAAGACCATATATTAATGACGATTATTGATGTGCTTATAGGTA
TGATGTTCATGTTGGGATACAAGACCCATACGAAGATTGTGTAGCGACGATGAGGCTTTACACGAGAATGAGATATCAGAAACA
CAAGATTGAAGCTTATCCTTTAGCTGCCGACGCGCACAACCGTAGCAATCAAGTGGCTTGGAGGCAGAACGAGTTCGAGAGGA
TGTCTCCTGATGAAATGCTTTCCATCTCTCGATCCGACTACTGTTGCTGGTGCTTGGACTCCCTCGCCTGA
SEQIDNO: 139
MDCRSMESSETLRNKCAACYKQFNKMEHLVEHMKISYHSGHEPTCGVCKKHCRSFESLREHLIGPLPKQECKNIFSILGCRFCLMILE
TPNARRIHQERCQFSSVNAGLTTRMAALGIRDKDMIDYTSSRSPKVVALSCKMVGGGSDGSLDLCARVCITDEGDNVVFHTYVKPSM
AVTNYRYEKTGIRPENLRDAMPLKHAQRKIQEFLCNGEPMWKIRPRGGKGRILVGHGLDHDLDRLQLEYPSSMIRDTAKYPPLMKTS
KLSNSLKYLTQAYLGYDVHVGIQDPYEDCVATMRLYTRMRYQKHKIEAYPLAADAHNRSNQVVWRQNEFERMSPDEMLSISRSDYY
CWCLDSLA
SEQIDNO: 140
ATAATACAAAAAAAATCATCAAAACAGTTGCTTAAACTCTCTCATATCTTAAGTTGCTACGTTTTTGTTTGTATTTTCCGATACGTA
CCATGGATTGCAGATCTATGGAGTCATCGGAAACCCTAAGGAACAAATGCGCAGCTTGTTATAAGCAATTCAACAAAATGGAAC
ATTTAGTGGAGCACATGAAGATCTCGTATCACTCCGGTCATGAGCCTACCTGCGGCGTTTGCAAGAAACATTGCCGATCTTTTG
AGTCCCTCCGAGAACACCTCATAGGGCCATTGCCAAAACAAGAATGCAAGAACATTTTCAGCATTCTCGGATGCAGATTCTGCT
TGATGATCCTCGAAACCCCGAACGCTCGTAGGATCCATCAAGAGAGATGCCAATTTTCGAGCGTCAATGCGGGATTGACGACT
CGTATGGCGGCCTTAGGCATAAGAGATAAGGACATGATCGACTACACGTCGTCTAGGTCCCCAAAAGTGGTTGCACTTTCTTGC
AAGATGGTAGGAGGGGGAAGCGACGGGTCGCTGGATCTATGTGCAAGGGTTTGCATAACGGATGAGGGCGACAATGTTGTGT
TCCATACGTACGTGAAACCGTCAATGGCCGTGACGAACTATAGGTATGAAAAGACCGGCATACGTCCGGAGAATCTGAGGGAC
GCAATGCCGTTGAAACATGCACAAAGAAAGATTCAAGAGTTTCTTTGTAATGGAGAACCCATGTGGAAGATTCGTCCAAGAGGT
GGGAAAGGGAGGATTCTCGTGGGACATGGCCTCGATCACGATCTTGACCGCCTTCAACTTGAATATCCTTCTTCCATGATAAGG
GATACTGCGAAATACCCTCCCTTGATGAAAACAAGCAAGCTGAGCAATTCCCTCAAGTACTTGACCCAAGCCTATCTCGGGTAT
GATGTTCATGTTGGGATACAAGACCCATACGAAGATTGTGTAGCGACGATGAGGCTTTACACGAGAATGAGATATCAGAAACAC
AAGATTGAAGCTTATCCTTTAGCTGCCGACGCGCACAACCGTAGCAATCAAGTGGTTTGGAGGCAGAACGAGTTCGAGAGGAT
GTCTCCTGATGAAATGCTTTCCATCTCTCGCTCCGACTACTATTGCTGGTGCTTGGACTCCCTCGCTTGATTTCTGAAACTCTGG
GGTTAAGTTGAGGAATTTCACATAATAACTTCGTAAACTTTTTGAAGATAATAAATTTAGTAGCGTAATGTCGAATAAGAATCAGT
TGTTATTTTTAATATGTACTAGTATATAAATTTTATAGTATGTGTCGTGTGAGACGCATATAAATTGTTA
SEQIDNO: 141
ATGGATTGCAGATCTATGGAGTCATCGGAAACCCTAAGGTAACCTATCCTCCATCGTACGTGTATTAGATTATATCAAGCGTTTA
TATGAAAATATCGAAAAGAACTCAGGGAGGGTGTCATCCACTATCACATCCAAATTCTATAATCAATTGATGAAAAACTAGAAATA
ATTTGTTTTCCTTAAATTATAGTTTTATACATATGTACACGTACGTGCAGGAACAAATGCGCAGCTTGTTATAAGCAATTCAACAA
AATGGAACATTTAGTGGAGCACATGAAGATCTCGTATCACTCCGGTCATGAGCCTACCTGCGGCGTTTGCAAGAAACATTGCCG
ATCTTTTGAGTCCCTCCGAGAACACCTCATAGGTAAATGATAACCTATATATATTAAGAGAAATGTATCGTTTTATACATTCACGA
CGCATATGTGTATTTATTTTTAATTGTGTTATATACATAGGGCCATTGCCAAAACAAGAATGCAAGAACATTTTCAGCATTCTCGG
ATGCAGATTCTGCTTGATGATCCTCGAAACCCCGAACGCTCGTAGGATCCATCAAGAGAGATGCCAATTTTCGAGCGTCAATGC
GGTAATCTTTTCTTCTCATATTTGCATAATTAAAATTGTTAATAATCAACCGCACAAAATATATTTATTCTTACATATATGATATGAT
TTTCTCTGTTTCAGGGATTGACGACTCGTATGGCGGCCTTAGGCATAAGAGATAAGGACATGATCGACTACACGTCGTCTAGGT
CCCCAAAAGTGGTTGCACTTTCTTGCAAGATGGTAGGAGGGGGAAGCGACGGGTCGCTGGATCTATGTGCAAGGGTTTGCATA
ACGGATGAGGGCGACAATGTTGTGTTCCATACGTACGTGAAACCGTCAATGGCCGTGACGAACTATAGGTATGAAAAGACCGG
CATACGTCCGGAGAATCTAAGGGACGCAATGCCCTTGAAACATGCACAAAGAAAGATTCAAGAGTTTCTTTGTAATGGAGAACC
CATGTGGAAGATTCGTCCAAGAGGTGGGAAAGGGAGGATTCTCGTGGGACATGGCCTCGATCACGATCTTGACCGCCTTCAAC
TTGAATATCCTTCTTCCATGATAAGGTGGCATTTCTATAAAGAAAAAATATAAAGAGGATATATATATAATAGAAAAAGACTAGCA
TAGCACCAAACCAAGTTTTTCCTCAAACTAGCACTCAAGGATCAAAGTCACAAAAATAGGTTTCATTAAAAAGATAAATATACTCT
TAGGGTTTAGAGTTAGGGGTGGAGTTTTTGAATTAGAGTTTAAAATTTTATAAAATAAAAAATAAATACTAAAAAATTAAAAATAAA
AATTAAAAAAACAGTTTCAAAAAGTATTTTTGAATTATAAAAAGAAAATTTAAAAAAAAATAAAAAAAATTTCGAAAAAAAATTATAA
AAAATGTCGAATCTGAAAACATATAATCTGAAACTATAAAAAAAAATTTCATTTTTTTTTATTTTTATTTTATTTGTTTTTATTTATTTT
GTTTGTTAATTTAATTTTAAACCAAAAGTATTAGACATATTTTATCATTTAATGAATGTCATTTTTGTGACTTTTTCCTTCTAATGTTA
TTTTTGAGATAAAAACTCAAAAGGTGCTATTATTGACAATTGTCACTAGATTCCTTTAGTGTTACTTGAAATCTTTCAATATAGCCA
ATGATTTTATGTGTGTTTTTTATATGACGGGATTTTGTATGATCTTATTGCTGTATGTAGGGATACTGCGAAATACCCTCCCTTGA
TGAAAACAAGCAAGCTGAGCAATTCCCTCAAGTACTTGACCCAAGCCTATCTCGGGTAATATATCTAATTTTGTTTTTGTAATAAT
ATTTTCAAACCGGGTGTTGATGCTTTGTATGGGCTTAAAGTTATAAGGGAGGGCTTCAAAACGTAAGATTCACATGTTTTCTAAT
ATATTCATTTCAAAATTTACACATAAACATATATATATAGTTTGTGTGACTAGAAATATCATTGAAGTAAATAAAATGAATTCATTAT
AATAAAAACAAATTTACATGGTTAGAAATTTTACTTTACCCTAGATACTTAATACTTATTAGCGTTGATTTTCCTTACATCAACCTG
GTTATTTCATTTTCTTTTCTTTTTAACGCAAATATATAGTTCCAATAGTATATACCCTTCTTTTCTGTATGTAATATTTTAAGATTTAT
TCCTAGGTTCACCCTTTAGGTTTACCAACTAATAAGATTTTGTTATTTCATATTCGATATCTTTCAAAAAAATGAGACAAAATATTA
TCAAATTATATTATGTTTTTAAAATAAAAAGTAAAAAAAAAAAAATAATAGTAGTTACAACAAAATAATTTAAAAAAATATTTTTAAC
GTCGTCAGTAAAACACTAAACCCTAAATGCTAAACCATAAACCATTGGATAACCCCTAAACCATTAGATAAATCCTAAACTCTAAA
TCAAAAACACTAAACACTAAACCCTAAATCCTAAATCCTTGAGTGTTTTAATGTTTAGTGTTTTGATTTAGAAATTAATATTTATCC
AAGGGCTTAGAGTTTACCCAAATGTTTAGGATTTATATATGGATTAAGATTTAGAATTTAATGTTTTGCTGACGACGTTAAATATAT
ATATATATATATATTTTTTTTTTTTGTAACTACTACTATTTTAAATTTATTTATTTATTAATTTTTATTTTTAAAACATAATATAATTTGA
CAATATTTTGTTTCATTTAAAAAAAATATCAAATATAAAATAACACAATTTTATTGGTTGATAAAGCTAGAGGTTTACTCTAGGGGG
TGAACCCAAAAATAAGTCATATTTTAGGGATGAGTAGTGTGTATGCCTCATACCATATGTTCAATATATAATATATGTTCGTGTCC
ATCAACCGTATAAGTAATCTAAAACACTTGAGATCAATTATATACACATTAATTGTCTAATGTTCAAGAATCAAGACCATATATTAA
TGATGATTATTGATGTGCCTATAGGTATGATGTTCATGTTGGGATACAAGACCCATACGAAGATTGTGTAGCGACGATGAGGCTT
TACACGAGAATGAGATATCAGAAACACAAGATTGAAGCTTATCCTTTAGCTGCCGACGCGCACAACCGTAGCAATCAAGTGGTT
TGGAGGCAGAACGAGTTCGAGAGGATGTCTCCTGATGAAATGCTTTCCATCTCTCGCTCCGACTACTATTGCTGGTGCTTGGAC
TCCCTCGCTTGA
SEQIDNO: 142
MDYRSSIESSETLRNKCAACYRQFNKMEHLVVHMKISYHSGHEPTCGVCKKHCRSFESLREHLIGPLPKQECKNIFSLRGCRFCMMI
LESPNARRTHQERCQFSSANAGLTTRMAALGLRDKAMIDYTSSRSPKVVALSCKMVGGGSDGSLDLCARVCITDESDNVVFHTYVK
PSMIVTNYRYGTTGIRPENLRDAMPLKHAQRKIQEFLCNGEPMWKIRPRGGRGRILVGHGLDHDLDRLQLEYPSSMMRDTAKYPPL
MKTSKLSNSLKYLTQAYLGYDIHVGIQDPYEDCVATMRLYTRMRYQKHKTEAYPQAADAQNRSNQVAWRQNEVERMSPDEMLSISR
SDYYCWCLDSLA
SEQIDNO: 143
ATGGACTACAGATCATCTATAGAATCATCAGAAACCCTAAGGAACAAGTGCGCAGCTTGTTATAGGCAATTCAACAAAATGGAAC
ATTTAGTGGTGCACATGAAGATCTCTTATCACTCCGGTCATGAGCCTACTTGTGGCGTTTGCAAGAAACATTGCCGATCTTTTGA
GTCCCTCCGGGAACATCTCATAGGACCATTGCCAAAACAAGAATGCAAGAACATTTTTAGCCTTCGCGGATGCAGATTCTGCAT
GATGATCCTGGAAAGCCCGAACGCTCGTAGGACCCATCAAGAGAGATGTCAATTTTCGAGCGCCAATGCTGGATTGACGACTC
GTATGGCGGCCTTAGGCCTAAGAGATAAGGCCATGATCGACTACACGTCCTCGCGGTCCCCAAAAGTGGTTGCACTCTCTTGC
AAGATGGTAGGAGGAGGAAGCGACGGGTCGTTGGATCTATGCGCAAGGGTCTGCATAACGGATGAGAGTGACAACGTTGTGT
TCCACACGTACGTGAAACCGTCAATGATCGTGACGAACTATAGGTACGGGACGACCGGGATACGTCCGGAGAATCTAAGGGAC
GCCATGCCGTTGAAACATGCTCAAAGAAAGATCCAAGAATTTCTTTGTAATGGAGAACCTATGTGGAAGATTCGTCCAAGAGGT
GGGAGAGGGAGGATTCTCGTGGGACATGGGCTCGACCACGATCTTGACCGCCTTCAACTTGAATATCCTTCTTCCATGATGAG
GGATACTGCAAAATACCCTCCGTTGATGAAAACAAGCAAGCTGAGCAATTCTCTCAAGTACTTAACCCAAGCCTATCTCGGGTAT
GATATTCATGTTGGGATACAAGACCCATACGAAGATTGTGTAGCGACGATGAGGCTGTACACAAGAATGAGATATCAGAAACAC
AAGACTGAAGCTTATCCTCAAGCTGCCGACGCACAGAACCGTAGCAATCAAGTGGCTTGGCGGCAGAACGAGGTCGAGAGGA
TGTCTCCTGATGAAATGCTCTCCATCTCTCGCTCCGACTACTATTGCTGGTGCTTGGACTCCCTCGCTTGA
SEQIDNO: 144
ATGGACTACAGATCATCTATAGAATCATCAGAAACCCTAAGGTAGCCATTTTTTCATCCTACGCGTGTTGTACCATGGATCATCG
TTTAAAATATTAAAAAAGAAGACTCATGGAGCGGCATGCAATATCATACCCAAATTCTATATGTGATAAAATGATTAAAACTAAAA
AAAAAGGTAAATATATTTATATATGTACACGTGCAGGAACAAGTGCGCAGCTTGTTATAGGCAATTCAACAAAATGGAACATTTA
GTGGTGCACATGAAGATCTCTTATCACTCCGGTCATGAGCCTACTTGTGGCGTTTGCAAGAAACATTGCCGATCTTTTGAGTCC
CTCCGGGAACATCTCATAGGTAAACACGAATATCTGTATATATATATAAAGATAAATATATCGTTTTTATATACACTATGAATTAGT
ATTTTTATCTTTAATTCTGTAATTAATGTCAATAGGACCATTGCCAAAACAAGAATGCAAGAACATTTTTAGCCTTCGOGGATGCA
GATTCTGCATGATGATCCTGGAAAGCCCGAACGCTCGTAGGACCCATCAAGAGAGATGTCAATTTTCGAGCGCCAATGCTGTAA
TCTTCGTAGTTCTTATCTCAACATACTTCACTTCTCATATTTGCGTATTTTAACTTGTAAAGAATCAACCACATGAAAGATATGTTC
TTACATATATATCATATGATTTCTTCCTTTCAGGGATTGACGACTCGTATGGCGGCCTTAGGCCTAAGAGATAAGGCCATGATCG
ACTACACGTCCTCGCGGTCCCCAAAAGTGGTTGCACTCTCTTGCAAGATGGTAGGAGGAGGAAGCGACGGGTCGTTGGATCTA
TGCGCAAGGGTCTGCATAACGGATGAGAGTGACAACGTTGTGTTCCACACGTACGTGAAACCGTCAATGATCGTGACGAACTA
TAGGTACGGGACGACCGGGATACGTCCGGAGAATCTAAGGGACGCCATGCCGTTGAAACATGCTCAAAGAAAGATCCAAGAAT
TTCTTTGTAATGGAGAACCTATGTGGAAGATTCGTCCAAGAGGTGGGAGAGGGAGGATTCTCGTGGGACATGGGCTCGACCAC
GATCTTGACCGCCTTCAACTTGAATATCCTTCTTCCATGATGAGGTAACATTTCTATAAGAAAAAGATAAAGAGGATACATACTTA
TAACTATATTTCTTTCAATATAACCTATATTTTTATTTTTTTTTTTTTTTTTTTTTTTTTTTTTGGTCAACTAAATAAATGAATGCAGTT
AAGGGTAATTGAACCCAGCATTTCTAGCACTGGTAATTTCTCTTAGAACCACTAGGCTAAAGTCACTTTTTTCCTATATTTTTATG
TTAGCTTGTTTTTTTATCGTGGAATTTCTATATCATTTTGTATGTATATTGGTGTATGTAGGGATACTGCAAAATACCCTCCGTTGA
TGAAAACAAGCAAGCTGAGCAATTCTCTCAAGTACTTAACCCAAGCCTATCTCGGGTAATATATCTAGTTTTGTTTTTGTAATATT
ACTTTACTTTTGAGTCTAACATATTGGAAAGTGAATATAGATGCATGCATACGTTATGTATATTGATACATATGTGAAGCAAATATT
ATCAATTAATTATTTCTCTTTTTTTTGCTAACTAATTAATTCTTTCTCAAAAAAATATCATCAATTAATTTATTAGGTGTTAACTATTC
ATGCTTTGTATGGCTTAAAGTTATAAGGAAGAGAGGATTCAAAACGTGAAAGATTAACATGTTTTAAAATGTATTCATCGACATCT
ACATATATATTTTATATATATACCATATTATATATAGATTGTATGGCTAAACTATCCAACAAAAAATGAAACACTTTACATGGTTAAT
TAGACATTTTTATTTTACACGAGATGCTATTACCGTAAATTTTTCTCTCCAAATCGAATACATCAACCTGCTTATTTCGTTTTTTTTT
TTGCCAATCGCAAATTATTCAAATAGTACAACAGAGTTTTTTTTTTGTATTTTAAATACTATGGATGAGTGTGTATGCCTCCTCATA
TCATATGTTGCATATAATATATGTTCGTGTCTACGCACCGAATAAGTAATATAAAACATTTGAGATCAATTAGACCCATTATCTGAT
GTTCAAGATTATTAACTAATGATGATTTTTGATGGTAATTATTTAGGAAACTTAACATTTACACCCAAAAAAAACTAATGATGATTA
TTGATGTGCTTATAGGTATGATATTCATGTTGGGATACAAGACCCATACGAAGATTGTGTAGCGACGATGAGGCTGTACACAAG
AATGAGATATCAGAAACACAAGACTGAAGCTTATCCTCAAGCTGCCGACGCACAGAACCGTAGCAATCAAGTGGCTTGGCGGC
AGAACGAGGTCGAGAGGATGTCTCCTGATGAAATGCTCTCCATCTCTCGCTCCGACTACTATTGCTGGTGCTTGGACTCCCTCG
CTTGA
SEQIDNO: 145
MDYRSPMESSETLRNKCAACYRQFNKMEHLVEHMKISYHSGHEPTCGVCKKHCRSFESLREHLIGPLPKQECKNIFSLRGCRFCMM
ILESPNARRIHQERCQFSSVNAGLTTRMAALGLRDKVMIDYTSSRSPKMVALSCKMVGGGSDGSLDVCARVCITDENDNVVFHTYVK
PSMVVTNYRYETTGIRPENLRDAMPLKHAQRKIQEFLCNGEPMWKIRPRGGKGRILVGHGLDHDPDRLQLEYPSSMMRDTAKYPPL
MKTSKLSNSLKYLTQAYLGYDIHVGIQDPYEDCVATMRLYTRMRYQKHKIEAYPLPADVQNRSNQVAWRQSEVERMSPNEMLSISRS
DYYCWCLDSLA
SEQIDNO: 146
ATGGATTACAGATCACCTATGGAGTCATCGGAAACCCTAAGGAACAAGTGCGCAGCTTGTTATAGGCAATTCAACAAAATGGAA
CATTTGGTGGAACACATGAAGATCTCTTATCACTCCGGTCATGAGCCTACTTGTGGAGTTTGCAAGAAACATTGCCGATCTTTTG
AGTCCCTCCGCGAACATCTCATAGGACCATTGCCAAAACAAGAATGCAAGAATATTTTTAGCCTTCGCGGATGCAGATTCTGCA
TGATGATCCTCGAAAGCCCTAACGCTCGTAGGATTCATCAAGAGAGATGTCAATTTTCGAGCGTCAATGCTGGATTGACGACTC
GTATGGCAGCCTTAGGCCTAAGAGATAAAGTCATGATCGACTACACGTCATCACGGTCTCCAAAAATGGTTGCACTCTCTTGCA
AGATGGTAGGAGGAGGAAGCGACGGGTCGTTGGATGTATGCGCAAGGGTTTGCATAACGGATGAGAACGACAACGTTGTGTT
CCATACGTACGTGAAACCGTCAATGGTCGTGACGAACTATAGGTACGAGACGACTGGTATACGTCCAGAGAATCTGAGGGACG
CAATGCCGTTGAAACATGCACAAAGAAAGATTCAAGAATTTCTTTGTAATGGAGAACCCATGTGGAAGATTCGTCCAAGAGGTG
GGAAAGGGAGGATTCTCGTGGGACATGGGCTGGATCACGATCCTGACCGCCTTCAACTTGAATATCCTTCTTCCATGATGAGG
GATACTGCAAAATATCCTCCGTTGATGAAAACAAGCAAGCTGAGCAATTCTCTCAAGTACTTAACCCAAGCCTATCTCGGGTATG
ATATTCATGTTGGGATACAAGACCCATACGAAGATTGTGTAGCGACGATGAGGCTTTACACGAGAATGAGATATCAGAAACATA
AGATTGAAGCATATCCTTTACCAGCCGACGTGCAGAACCGTAGCAATCAAGTGGCTTGGAGGCAGAGCGAGGTCGAAAGGATG
TCTCCTAATGAAATGCTCTCCATCTCTCGCTCCGACTACTATTGCTGGTGCTTGGACTCCCTCGCTTGATTCCTAAAACTATGGG
GTTAATTTGGGAATCTCTCATAATTACTTCATAAACTTTTTCGAGATTTTAATTTAGTAGCGTAAAGTCGAATAAGCATTAATTCTG
ATTTTCTAATAGTATCTAAATTAATTTTATAGTATGTGTCGTGTGAGATGCGAATGTTGTTCCTGTACTTCTAATAACGCATATTGC
TCTTAATTATTAATAATTATAATTTTTGTTGAAATTAATTATCAAATCACATGTTAGCTTTTGTCTATAAATATATCTATATTTGTCTT
AG
SEQIDNO: 147
ATGGATTACAGATCACCTATGGAGTCATCGGAAACCCTAAGGTAACCATTTTCATCCTAAGCGTGTTATATCAAGCGTTTTAATT
GGAAAATAAATCCCAAAGAAAAACTCAATGGAGTGGCATGCAATATCATACCCAAATTCTGTAGTCAAGTGATGAAAAACTAAAA
TTTAAAGTTTTTGCTAAAATATATTTGTATATATATGTAAAAAAATATTTATGTATATATGTACACGTGCAGGAACAAGTGCGCAGC
TTGTTATAGGCAATTCAACAAAATGGAACATTTGGTGGAACACATGAAGATCTCTTATCACTCCGGTCATGAGCCTACTTGTGGA
GTTTGCAAGAAACATTGCCGATCTTTTGAGTCCCTCCGCGAACATCTCATAGGTAAACAAGAAGCTCTATATAAAGAGTGACATA
TAGTTTTATATATACGCTATGCATTTGTATGTTAATTTTTAATTGTGTAATGTCAATAGGACCATTGCCAAAACAAGAATGCAAGAA
TATTTTTAGCCTTCGCGGATGCAGATTCTGCATGATGATCCTCGAAAGCCCTAACGCTCGTAGGATTCATCAAGAGAGATGTCA
ATTTTCGAGCGTCAATGCTGTACGTAATCGTATTAATGTCCTTATCTCAATACTCCTCTTCTCATATTTGCGTAACTAAACTTGTAA
ATTGACCGCATGAAAAAAAAATTCTTATATAAATAATATAATATCATATGATTTGTCTTTTTTCAGGGATTGACGACTCGTATGGCA
GCCTTAGGCCTAAGAGATAAAGTCATGATCGACTACACGTCATCACGGTCTCCAAAAATGGTTGCACTCTCTTGCAAGATGGTA
GGAGGAGGAAGCGACGGGTCGTTGGATGTATGCGCAAGGGTTTGCATAACGGATGAGAACGACAACGTTGTGTTCCATACGTA
CGTGAAACCGTCAATGGTCGTGACGAACTATAGGTACGAGACGACTGGTATACGTCCAGAGAATCTGAGGGACGCAATGCCGT
TGAAACATGCACAAAGAAAGATTCAAGAATTTCTTTGTAATGGAGAACCCATGTGGAAGATTCGTCCAAGAGGTGGGAAAGGGA
GGATTCTCGTGGGACATGGGCTGGATCACGATCCTGACCGCCTTCAACTTGAATATCCTTCTTCCATGATGAGGTGACATTTCT
ATAAAGAAGAAAAGTAAAGAGGACACATATATATAACTAGATTCCTTATAGTGTTACTTGGTTTCTGGCAACATAACCCAGGTTTA
TGTGAGTTGTTTTATAATTAACGTGAATTTCTAATATCATTTTTATATATTGGTGTATGTAGGGATACTGCAAAATATCCTCCGTTG
ATGAAAACAAGCAAGCTGAGCAATTCTCTCAAGTACTTAACCCAAGCCTATCTCGGGTAATATATCTACTTTTGTTTCTGTAATAC
TACTTTCGAATATAACATTAATTTGGAAAATGAATATAGATATATGCATGCTTTACGTGTATTGATACATAAGTGTATCATGTACTA
TCCATTAATTTTTTGGTGATGTATGGGTATTGATGCTTTGTATGGGCTTAAAGCTAAAAGGAAGGGATTCAAAACGTGAAAAGAT
TCATATGTTATATAATATATACCATTTTCTAACAAAAACAAAAAGAACTTACATAGTTGGAGATTTTTAATTTACATGAGATGCTTA
CTAGCGTAATTTTTATCGCCAAGTTGACTACATCAACCTGTTTATTTCATTTGATTTCCTATCAATTACAAACAGTTCAACTAGTAT
ACCATTGTTTTGTATGTAAAACTTTAGGGATGAGTGTGTATGCCTAATAATATCATATGTTCCATATAATCTGTGTTCGTTTCTACA
CACCGTAGAAGTAATCTCAAACACTTGAGATCAATTAATTATACCCATTATCTAATGTACAACAATATATATTAAGGATGGTATTG
ATGTGCTTATAGGTATGATATTCATGTTGGGATACAAGACCCATACGAAGATTGTGTAGCGACGATGAGGCTTTACACGAGAAT
GAGATATCAGAAACATAAGATTGAAGCATATCCTTTACCAGCCGACGTGCAGAACCGTAGCAATCAAGTGGCTTGGAGGCAGA
GCGAGGTCGAAAGGATGTCTCCTAATGAAATGCTCTCCATCTCTCGCTCCGACTACTATTGCTGGTGCTTGGACTCCCTCGCTT
GATTCCTAAAACTATGGGGTTAATTTGGGAATCTCTCATAATTACTTCATAAACTTTTTCGAGATTTTAATTTAGTAGCGTAAAGTC
GAATAAGCATTAATTCTGATTTTCTAATAGTATCTAAATTAATTTTATAGTATGTGTCGTGTGAGATGCGAATGTTGTTCCTGTACT
TCTAATAACGCATATTGCTCTTAATTATTAATAATTATAGTTTTTGCTGAAATCTATACTATTATTTGGTAAGTAATTTTTCGCATTC
GAGCTATCACGTTAAAAGTTGGAGTAGTTAAAGTCATTGTTACCCTTAATGAATGATTAAATTTATTTTTAGATTATATTATTGATT
ATAAATTAATATTATAAAAAAATAGCCATATATAAAAACGAATTTTAAATTTATTAAATCAGATAATTTATTACAATTGATACAATAAA
AGTTAACTAAACATTAAATGTACTTTAAAAATAAAAATATAATTCTTATATATTTTGTGTTGTTATCCGAAGATAATATATTTTAATAT
ATTTTAAAAATAGATTTAAAAATTCAAAGAGAATTTTAATTTTATTAAATCAGATAATTCATTAAAATTGATATAATAAAAGTTATCTA
AACATTAAATTTATTTTAAAAATAAAAATATAAGTCTTTTATATTATTCTATTTTTTTTGTCATATCTTATATATTTTTTGTTATCCGAA
GATAATATATTTTAATATATTTTAAAAATAGATTGAAAAATTAAAATATTTAAGTTTTAAAATATATTATGTTATCCAAAAAATATTTC
ACATTATAATATTTTTAAAATAAATATAAATCTCTGTATATATATTTTTATGTATATATGAAGGTTTTCAAGTTTGTTTTAATAAAAGA
TATTTTATTAAAGTAAACAAAATATGGTATATAAAATTTTTATTATTTAATTAAATATTAAATATTTCAAAAAGCAAGAAAATAATTGA
TTTAATGGTTTTTAAATTGATAATATATTTAGTTGCAATTTTTTTGTAAAATTATTAAGCCCGCCAGTGCGGGCAACACACCTAGTT
AATTAGTAATCACTTGTTAGCTTTTGTCTATAAATATATCTATATTTTTCTTAGAGTTTTTAACACATATGAAAAAATAATGGAAATT
TTCTTTTTTTTTTATAACAAATTTACACAATAATGAGAGGTGTTTCAAAAAAAAAACACAATAAGGAGAGATTTTTGTTGAAATTAAT
TATCAAATCACATGTTAGCTTTTGTCTATAAATATATCTATATTTGTCTTAG
SEQIDNO: 148
MDYRSSIESSETLRNKCAACYRQFNKMEHLVEHMKISYHSGHEPTCGVCKKHCRSFESLREHLIGPLPKQECKNIFSLRGCRFCMMI
LESPNARRIHQERCHFSSLNAGLTTRMAALGLRDKALIDYTSSRFPKVVALSCKMVGGGSDGSLDLCARVCITDESDNVVFHTYVKPS
MVVTNYRYGTTGIRPENLREAMPLKHAQRKIQEFLCNGEPMWKIRPRGGRGRILVGHGLDHDLDRLQLEYPSSMMRDTAKYPPLMK
TSKLSNSLKYLTQAYLGYDIHVGIQDPYEDCVATMRLYTRMRYQKHKIEAYPQAADSQNRSNQVAWRQNEVEKMSPDEMLSISRSD
YYCWCLDSLA
SEQIDNO: 149
ATGGATTACAGATCATCTATCGAATCATCAGAAACCCTAAGGAACAAGTGCGCAGCTTGTTATAGGCAATTCAACAAAATGGAAC
ATTTAGTGGAGCACATGAAGATCTCTTATCACTCCGGTCATGAGCCTACTTGTGGCGTTTGCAAGAAACATTGCCGATCTTTTGA
GTCCCTCCGGGAACATCTCATAGGACCATTGCCAAAACAAGAATGCAAGAACATTTTTAGCCTTCGCGGATGCAGATTCTGCAT
GATGATCCTCGAAAGCCCAAACGCTCGTAGGATCCATCAAGAGAGATGTCATTTTTCGAGCCTCAATGCTGGATTGACGACTCG
TATGGCGGCCTTAGGCCTAAGAGATAAGGCCTTAATCGACTACACGTCCTCGCGGTTTCCAAAAGTGGTGGCACTCTCTTGCAA
GATGGTAGGAGGAGGAAGCGATGGGTCATTGGATCTATGCGCAAGGGTCTGCATAACTGATGAGAGTGACAACGTTGTGTTTC
ACACGTACGTGAAACCGTCAATGGTCGTGACGAACTATAGGTACGGGACGACTGGGATACGTCCGGAGAATTTAAGGGAAGCA
ATGCCGTTGAAACATGCTCAAAGAAAGATCCAAGAATTTCTTTGTAATGGAGAACCCATGTGGAAGATTCGTCCAAGAGGTGGG
AGAGGGAGGATTCTCGTGGGACATGGGCTCGACCACGATCTTGACCGCCTTCAACTTGAATATCCTTCTTCCATGATGAGGGAT
ACTGCAAAATACCCTCCGTTGATGAAAACAAGCAAGCTGAGCAATTCTCTCAAGTACTTAACCCAAGCCTATCTCGGGTATGATA
TTCATGTTGGGATACAAGACCCATACGAAGATTGTGTAGCGACGATGAGGCTGTACACAAGAATGAGATATCAGAAACACAAGA
TTGAAGCTTATCCTCAAGCTGCCGACTCACAGAACCGTAGCAATCAAGTGGCTTGGCGGCAGAACGAGGTCGAGAAGATGTCT
CCTGATGAAATGCTCTCTATCTCTCGCTCCGACTATTATTGCTGGTGCTTGGACTCCCTCGCTTGATTTCTAAAACTATGGGGCT
AATTTGAGTAATCTCTCACAACTACTACACAAACTCTTTTCGGGATTCTAATCTAGTA
SEQIDNO: 150
ATGGATTACAGATCATCTATCGAATCATCAGAAACCCTAAGGTAACCATTTTTTTCATCATACTCGTGTTATAACTTATATTAAGC
GTTCTAATAAAAATATTCTAAAGGAAGACTCATGGAGTGGCATGCAATATCATACCCAAACCCAAATTCTATATGTGATAAACTGA
CGAAAACTAAAAAAAATAGGTAGACATATTTATATATGTACACGTGCAGGAACAAGTGCGCAGCTTGTTATAGGCAATTCAACAA
AATGGAACATTTAGTGGAGCACATGAAGATCTCTTATCACTCCGGTCATGAGCCTACTTGTGGCGTTTGCAAGAAACATTGCCG
ATCTTTTGAGTCCCTCCGGGAACATCTCATAGGTAAATAAGAATATCTGTATATATATATATATATACATACATATATAAAGATAAA
TATATCGTTTTTATATACACTATGCAATAGCATTTTTTATCTTTAATTTTGTAATGTCAATAGGACCATTGCCAAAACAAGAATGCA
AGAACATTTTTAGCCTTCGCGGATGCAGATTCTGCATGATGATCCTCGAAAGCCCAAACGCTCGTAGGATCCATCAAGAGAGAT
GTCATTTTTCGAGCCTCAATGCTGTAATCTTCTTAGTTCATATCTCAATATACTTCACTTCTCATTTTTGCTTATTCTAACTTATAAA
GAATCAGCCGCATGAAAGATATGTTCTTACATTTATATCATATAATTTCTTCATTTCAGGGATTGACGACTCGTATGGCGGCCTTA
GGCCTAAGAGATAAGGCCTTAATCGACTACACGTCCTCGCGGTTTCCAAAAGTGGTGGCACTCTCTTGCAAGATGGTAGGAGG
AGGAAGCGATGGGTCATTGGATCTATGCGCAAGGGTCTGCATAACTGATGAGAGTGACAACGTTGTGTTTCACACGTACGTGA
AACCGTCAATGGTCGTGACGAACTATAGGTACGGGACGACTGGGATACGTCCGGAGAATTTAAGGGAAGCAATGCCGTTGAAA
CATGCTCAAAGAAAGATCCAAGAATTTCTTTGTAATGGAGAACCCATGTGGAAGATTCGTCCAAGAGGTGGGAGAGGGAGGATT
CTCGTGGGACATGGGCTCGACCACGATCTTGACCGCCTTCAACTTGAATATCCTTCTTCCATGATGAGGTAACATTTCTATAAGA
AACAGATAAAGAGAAAGAGGATACGTACTTATAACTATATTTCTTTCAATATAACCTATATTTTATGTTAGCTTGTTATATATCGTA
GAATTTCTATATCATTTTGTATGTATACTGGTGTACGTAGGGATACTGCAAAATACCCTCCGTTGATGAAAACAAGCAAGCTGAG
CAATTCTCTCAAGTACTTAACCCAAGCCTATCTCGGGTAATATATCTAGTTTTGTTTCTGTAATATTACTTTTGAGTCTAACATATT
GGAAAGTGAATATAGATGCATGCATACGTTATGTATATTGAAACATATATATGTGAAGCAAATATTATCAATTAATTCTTTCTCTCT
TTTTTTTTGGTAACTATTTAATTCTTTCTCAAAAAAAAATATTATCAATTAATTTATTTGGTGTTATGCTATTGATGCTTTGTATACGC
TTAAAGTTATAAAGAATAGAGGATTCAAAACGTGAAAGATTCACATGTTTTAAAATATAGTCATCGACATCTACATATATATATTAT
ATATATACCATATTATATATAGATTGTATGGCTAAACTATCCAACAAAAAAACGAAACACTTATTTCGTTTTCTTTTTTTTTTTGCCA
ATCGCAAATTATTCAAATAGTACAACAGATTTTTTTTTGTATTTTAAATACTATGTATGAGTGTGTATGCCTCATATCGTATGTTGC
ATATAATATATGTTCGTGTCTACGCATCGAATAAGTAATATAAAACATTTGAGATCAATTAGACACATTATCTGATGTTCAAGATTA
TTAACTAATGATGATTATTGATGTGCTTATAGGTATGATATTCATGTTGGGATACAAGACCCATACGAAGATTGTGTAGCGACGA
TGAGGCTGTACACAAGAATGAGATATCAGAAACACAAGATTGAAGCTTATCCTCAAGCTGCCGACTCACAGAACCGTAGCAATC
AAGTGGCTTGGCGGCAGAACGAGGTCGAGAAGATGTCTCCTGATGAAATGCTCTCTATCTCTCGCTCCGACTATTATTGCTGGT
GCTTGGACTCCCTCGCTTGA
SEQIDNO: 151
MDCRSSMESSETLRNKCAACYKQFNKFEHLVEHMKISYHSGHEPMCGVCKKHCRSFESLREHLIGPLPKQECKNIFSFRGCRFCLMI
LETPNARRIHQERCQFSSVNAGLTTRMAALGVRDKAMIDYTSSRSPKVVALSCKMVGGGSDGSLDLCARVCITDESDNVVFHTYVKP
PMPVTNYRYEKTGIRPENLRDAMPLKHAQRKIQEFLCNGEPMWKIRPRGGKGRILVGHGLDHDLDRLQLEYPSSMIRDTAKYPPLMK
TSKLSNSLKYLTQAYLGYDVHVGIQDPYEDCVATMRLYTRMRYQKHKIEAYPLAADAHNRSNQVAWRQNEFERMSPDEMLSISRSD
YYCWCLDSLA
SEQIDNO: 152
ATGGATTGCAGATCATCTATGGAGTCATCGGAAACCCTAAGGAACAAGTGCGCAGCTTGTTATAAACAATTCAACAAATTCGAAC
ATTTAGTGGAGCACATGAAGATCTCGTATCACTCCGGTCATGAGCCTATGTGTGGCGTTTGCAAGAAACATTGCCGTTCTTTTGA
GTCCCTCCGGGAACATCTCATAGGGCCATTGCCAAAACAAGAATGCAAGAACATTTTCAGCTTTCGCGGATGCAGATTCTGCTT
GATGATCCTCGAAACCCCGAACGCTCGTAGGATCCATCAAGAGAGATGCCAATTTTCGAGCGTCAATGCTGGATTGACGACTC
GTATGGCGGCCTTAGGCGTAAGAGATAAGGCCATGATCGACTACACGTCGTCTAGATCCCCAAAAGTGGTTGCACTCTCTTGC
AAGATGGTAGGAGGGGGAAGCGACGGGTCGCTGGATCTATGCGCAAGGGTTTGCATAACGGATGAGAGCGACAACGTTGTGT
TCCATACGTACGTGAAACCGCCAATGCCCGTGACGAACTATAGGTATGAGAAGACCGGCATACGTCCGGAGAATCTAAGGGAC
GCAATGCCCTTGAAACATGCACAAAGAAAGATTCAAGAGTTTCTTTGTAATGGAGAACCCATGTGGAAGATTCGTCCAAGAGGT
GGGAAAGGGAGGATTCTCGTGGGACATGGCCTCGATCACGATCTTGACCGCCTTCAACTTGAATATCCTTCTTCCATGATAAGG
GATACTGCGAAATACCCTCCGTTGATGAAAACAAGCAAGCTGAGCAATTCCCTCAAGTACTTGACCCAAGCCTATCTCGGGTAT
GATGTTCATGTTGGGATACAAGACCCATACGAAGATTGTGTAGCGACGATGAGGCTTTACACGAGAATGAGATATCAGAAACAC
AAGATTGAAGCTTATCCTTTAGCTGCCGACGCGCACAACCGTAGCAATCAAGTGGCTTGGAGGCAGAACGAGTTCGAGAGGAT
GTCTCCTGATGAAATGCTTTCCATCTCTCGATCCGACTACTATTGCTGGTGCTTGGACTCCCTCGCCTGA
SEQIDNO: 153
ATGGATTGCAGATCATCTATGGAGTCATCGGAAACCCTAAGGTAACCTATCTTCCATCGTACGTGTATTATATTATATCAAGCGT
TTATATGAAAATATCGAAAAGAACTCATGGAGGATGTCATCCAGTATCACACCCAAATTCTATAATCAATTGATGAAAAATAAGAA
ATAAAGTTTTTCTTAATTTATAGTTTTTATACATATGTACACGCACGTGCAGGAACAAGTGCGCAGCTTGTTATAAACAATTCAAC
AAATTCGAACATTTAGTGGAGCACATGAAGATCTCGTATCACTCCGGTCATGAGCCTATGTGTGGCGTTTGCAAGAAACATTGC
CGTTCTTTTGAGTCCCTCCGGGAACATCTCATAGGTAAATGATAAGCTATATATATTAAGAGAAATATATCGTTTTATATATTCAC
GACGCATATGTGTATTTATTTTTTATTGTGCTATATTATTAGGGCCATTGCCAAAACAAGAATGCAAGAACATTTTCAGCTTTCGC
GGATGCAGATTCTGCTTGATGATCCTCGAAACCCCGAACGCTCGTAGGATCCATCAAGAGAGATGCCAATTTTCGAGCGTCAAT
GCTGTAATCTTTTCTTCTAATATTTGCGCAAATTAAAATTGTTAATAATCAACCGCATAACAATATATTCTTACATATTTTCTATGTA
TCAGGGATTGACGACTCGTATGGCGGCCTTAGGCGTAAGAGATAAGGCCATGATCGACTACACGTCGTCTAGATCCCCAAAAG
TGGTTGCACTCTCTTGCAAGATGGTAGGAGGGGGAAGCGACGGGTCGCTGGATCTATGCGCAAGGGTTTGCATAACGGATGA
GAGCGACAACGTTGTGTTCCATACGTACGTGAAACCGCCAATGCCCGTGACGAACTATAGGTATGAGAAGACCGGCATACGTC
CGGAGAATCTAAGGGACGCAATGCCCTTGAAACATGCACAAAGAAAGATTCAAGAGTTTCTTTGTAATGGAGAACCCATGTGGA
AGATTCGTCCAAGAGGTGGGAAAGGGAGGATTCTCGTGGGACATGGCCTCGATCACGATCTTGACCGCCTTCAACTTGAATAT
CCTTCTTCCATGATAAGGTGGCATTTCTATAAAGAAAAACAAAATATAAAGAGGATATATACGTATATAACTAGATTCCTTTAGTG
TTACTTGAAATCTTTCAATATAGCCCATGATTTTATGTGTGTTTTTTATATGACGGGATTTTGTATCATTTTATTGCTGTATGTAGG
GATACTGCGAAATACCCTCCGTTGATGAAAACAAGCAAGCTGAGCAATTCCCTCAAGTACTTGACCCAAGCCTATCTCGGGTAA
TATATCTAATTTTGTTTTTGTAATAATATTTTCGAACCTAACACATTAATTTGGAAAATGATTATAGATGCATGCATACATTACCTAT
ATTGATACACATATATATCATAATAGGTGGGTATTGATGTTTGTATGGGCTTAAATGGGAGGGCTTCAAAACGTAAGATTTACAT
GTTTTCAAATATATTCATTTCAAAATTTACACATAAACATATATACTTTGTGTGATTAGAACTATCATTGAAGTAAATAAAATGAAAT
CATTATAACAAAAAGGAATTTACATGGTTAGAAATTTTACTTTACCCTAGATACTTAATACTTATTAGCGTAGATTTTCCTTACATC
AACCTGTTTATTTCATTTTCTTTTCTTTTTAACGCAAATATATAGTTCCAATAGTATTTACCCTTGTTTTCTGTATGTAAAATTTTAG
GGATGAGTAGTGTGTATGCCTCATACCATATGTTCCATATATAATCTATGTTCGTGTCTACCAACCGTATAAGTAATCTAAAACAC
TTGAGATCAATTATATACACATTAATTGTCTAATGTTCAAGAATCAAGACCATATATTAATGACGATTATTGATGTGCTTATAGGTA
TGATGTTCATGTTGGGATACAAGACCCATACGAAGATTGTGTAGCGACGATGAGGCTTTACACGAGAATGAGATATCAGAAACA
CAAGATTGAAGCTTATCCTTTAGCTGCCGACGCGCACAACCGTAGCAATCAAGTGGCTTGGAGGCAGAACGAGTTCGAGAGGA
TGTCTCCTGATGAAATGCTTTCCATCTCTCGATCCGACTACTATTGCTGGTGCTTGGACTCCCTCGCCTGA
SEQIDNO: 154
MESSETLRNKCAACYRQFNKMEHLVEHMKISYHSGHEPTCGVCKKHCRSFESLREHLIGPLPKQECKNIFSLRGCRFCMMILESPNA
RRIHQERCQFSSVNAGLTTRMAALGLRDKVMIDYTSSRSPKMVALSCKMVGGGSDGSLDVCARVCITDENDNVVFHTYVKPSMVVT
NYRYETTGIRPENLRDAMPLKHAQRKIQEFLCNGEPMWKIRPRGGKGRILVGHGLDHDPDRLQLEYPSSMMRDTAKYPPLMKTSKL
SNSLKYLTQAYLGYDIHVGIQDPYEDCVATMRLYTRMRYQKHKIEAYPLPADVQNRSNQVAWRQSEVERMSPNEMLSISRSDYYCW
CLDSLA
SEQIDNO: 155
ATGGAGTCATCGGAAACCCTAAGGAACAAGTGCGCAGCTTGTTATAGGCAATTCAACAAAATGGAACATTTGGTGGAACACATG
AAGATCTCTTATCACTCCGGTCATGAGCCTACTTGTGGAGTTTGCAAGAAACATTGCCGATCTTTTGAGTCCCTCCGCGAACATC
TCATAGGACCATTGCCAAAACAAGAATGCAAGAATATTTTTAGCCTTCGCGGATGCAGATTCTGCATGATGATCCTCGAAAGCC
CTAACGCTCGTAGGATTCATCAAGAGAGATGTCAATTTTCGAGCGTCAATGCTGGATTGACGACTCGTATGGCAGCCTTAGGCC
TAAGAGATAAAGTCATGATCGACTACACGTCATCACGGTCTCCAAAAATGGTTGCACTCTCTTGCAAGATGGTAGGAGGAGGAA
GCGACGGGTCGTTGGATGTATGCGCAAGGGTTTGCATAACGGATGAGAACGACAACGTTGTGTTCCATACGTACGTGAAACCG
TCAATGGTCGTGACGAACTATAGGTACGAGACGACTGGTATACGTCCAGAGAATCTGAGGGACGCAATGCCGTTGAAACATGC
ACAAAGAAAGATTCAAGAATTTCTTTGTAATGGAGAACCCATGTGGAAGATTCGTCCAAGAGGTGGGAAAGGGAGGATTCTCGT
GGGACATGGGCTGGATCACGATCCTGACCGCCTTCAACTTGAATATCCTTCTTCCATGATGAGGGATACTGCAAAATATCCTCC
GTTGATGAAAACAAGCAAGCTGAGCAATTCTCTCAAGTACTTAACCCAAGCCTATCTCGGGTATGATATTCATGTTGGGATACAA
GACCCATACGAAGATTGTGTAGCGACGATGAGGCTTTACACGAGAATGAGATATCAGAAACATAAGATTGAAGCATATCCTTTA
CCAGCCGACGTGCAGAACCGTAGCAATCAAGTGGCTTGGAGGCAGAGCGAGGTCGAAAGGATGTCTCCTAATGAAATGCTCTC
CATCTCTCGCTCCGACTACTATTGCTGGTGCTTGGACTCCCTCGCTTGA
SEQIDNO: 156
ATGGAGTCATCGGAAACCCTAAGGTAACCATTTTCATCCTAAGCGTGTTATATCAAGCGTTTTAATTGGAAAATAAATCCCAAAG
AAAAACTCAATGGAGTGGCATGCAATATCATACCCAAATTCTGTAGTCAAGTGATGAAAAACTAAAATTTAAAGTTTTTGCTAAAA
TATATTTGTATATATATGTAAAAAAATATTTATGTATATATGTACACGTGCAGGAACAAGTGCGCAGCTTGTTATAGGCAATTCAA
CAAAATGGAACATTTGGTGGAACACATGAAGATCTCTTATCACTCCGGTCATGAGCCTACTTGTGGAGTTTGCAAGAAACATTGC
CGATCTTTTGAGTCCCTCCGCGAACATCTCATAGGTAAACAAGAAGCTCTATATAAAGAGTGACATATAGTTTTATATATACGCTA
TGCATTTGTATGTTAATTTTTAATTGTGTAATGTCAATAGGACCATTGCCAAAACAAGAATGCAAGAATATTTTTAGCCTTCGCGG
ATGCAGATTCTGCATGATGATCCTCGAAAGCCCTAACGCTCGTAGGATTCATCAAGAGAGATGTCAATTTTCGAGCGTCAATGC
TGTACGTAATCGTATTAATGTCCTTATCTCAATACTCCTCTTCTCATATTTGCGTAACTAAACTTGTAAATTGACCGCATGAAAAAA
AAATTCTTATATAAATAATATAATATCATATGATTTGTCTTTTTTCAGGGATTGACGACTCGTATGGCAGCCTTAGGCCTAAGAGA
TAAAGTCATGATCGACTACACGTCATCACGGTCTCCAAAAATGGTTGCACTCTCTTGCAAGATGGTAGGAGGAGGAAGCGACG
GGTCGTTGGATGTATGCGCAAGGGTTTGCATAACGGATGAGAACGACAACGTTGTGTTCCATACGTACGTGAAACCGTCAATG
GTCGTGACGAACTATAGGTACGAGACGACTGGTATACGTCCAGAGAATCTGAGGGACGCAATGCCGTTGAAACATGCACAAAG
AAAGATTCAAGAATTTCTTTGTAATGGAGAACCCATGTGGAAGATTCGTCCAAGAGGTGGGAAAGGGAGGATTCTCGTGGGACA
TGGGCTGGATCACGATCCTGACCGCCTTCAACTTGAATATCCTTCTTCCATGATGAGGTGACATTTCTATAAAGAAGAAAAGTAA
AGAGGACACATATATATAACTAGATTCCTTATAGTGTTACTTGGTTTCTGGCAACATAACCCAGGTTTATGTGAGTTGTTTTATAA
TTAACGTGAATTTCTAATATCATTTTTATATATTGGTGTATGTAGGGATACTGCAAAATATCCTCCGTTGATGAAAACAAGCAAGC
TGAGCAATTCTCTCAAGTACTTAACCCAAGCCTATCTCGGGTAATATATCTACTTTTGTTTCTGTAATACTACTTTCGAATATAACA
TTAATTTGGAAAATGAATATAGATATATGCATGCTTTACGTGTATTGATACATAAGTGTATCATGTACTATCCATTAATTTTTTGGT
GATGTATGGGTATTGATGCTTTGTATGGGCTTAAAGCTAAAAGGAAGGGATTCAAAACGTGAAAAGATTCATATGTTATATAATAT
ATACCATTTTCTAACAAAAACAAAAAGAACTTACATAGTTGGAGATTTTTAATTTACATGAGATGCTTACTAGCGTAATTTTTATCG
CCAAGTTGACTACATCAACCTGTTTATTTCATTTGATTTCCTATCAATTACAAACAGTTCAACTAGTATACCATTGTTTTGTATGTA
AAACTTTAGGGATGAGTGTGTATGCCTAATAATATCATATGTTCCATATAATCTGTGTTCGTTTCTACACACCGTAGAAGTAATCT
CAAACACTTGAGATCAATTAATTATACCCATTATCTAATGTACAACAATATATATTAAGGATGGTATTGATGTGCTTATAGGTATGA
TATTCATGTTGGGATACAAGACCCATACGAAGATTGTGTAGCGACGATGAGGCTTTACACGAGAATGAGATATCAGAAACATAA
GATTGAAGCATATCCTTTACCAGCCGACGTGCAGAACCGTAGCAATCAAGTGGCTTGGAGGCAGAGCGAGGTCGAAAGGATGT
CTCCTAATGAAATGCTCTCCATCTCTCGCTCCGACTACTATTGCTGGTGCTTGGACTCCCTCGCTTGA
SEQIDNO: 157
MRTSYHSVHEPTCGICNKHCRSFDSLREHLIGPLPKQECKNIFSICGCRFCLTNLESPNARRIHQERCQFSNGLTTRMAVLGLRDNPTI
DYTSSRSPRVVALSCKMVGGGSDESLDLCARVCITDESENVIFHTYVKPTLPITNYRYETTGIRPENIRDAMPLKQAQRKIKEFLCYGE
PMWKIRPRSGKARILVGHGLDSHLDCLQIEYSSSMIRDTAEYPPLMKTSKLSNSLKYLTQAYLGYDIHVGMQDPYEDCVATMRLYKRI
RYQKHKTDAYPLASDTHNTNNYASWRQSELENMSEDELLNLSRSDYYCWCLDSVP
SEQIDNO: 158
ATGAGGACGTCTTACCATTCGGTTCATGAACCTACGTGTGGCATTTGCAACAAACACTGCCGATCTTTTGATTCCCTCCGTGAAC
ACCTCATTGGGCCATTGCCGAAACAGGAATGTAAGAACATTTTCAGCATCTGCGGCTGCAGATTCTGCCTTACGAACCTTGAAA
GCCCCAACGCTCGTAGGATCCATCAGGAGAGATGCCAATTCTCAAACGGACTAACTACTCGTATGGCGGTCTTAGGCCTAAGA
GACAATCCTACAATCGATTACACTTCTTCCAGGTCACCACGAGTGGTCGCACTCTCATGCAAGATGGTTGGAGGAGGGAGTGAT
GAATCGCTTGACCTATGCGCGAGAGTTTGCATAACAGATGAGAGCGAAAACGTGATTTTTCACACGTACGTGAAGCCAACATTG
CCCATAACGAATTACAGGTACGAGACTACAGGAATACGACCTGAGAATATAAGGGACGCGATGCCATTGAAACAAGCACAGAG
AAAGATTAAGGAGTTTCTCTGTTATGGAGAACCAATGTGGAAGATTCGTCCAAGAAGTGGAAAAGCGAGGATTCTCGTGGGACA
TGGACTTGATAGCCATCTTGACTGTCTTCAAATTGAATATTCTTCTTCCATGATAAGAGATACTGCGGAATACCCTCCATTGATGA
AAACAAGCAAGCTAAGCAACTCGCTCAAGTACTTAACCCAAGCCTATCTGGGGTATGACATTCATGTGGGGATGCAAGATCCTT
ATGAGGACTGTGTCGCGACGATGAGGCTGTACAAAAGAATACGATATCAAAAACACAAGACGGATGCTTATCCGTTGGCCTCAG
ACACGCATAACACAAATAACTATGCGTCCTGGAGACAGAGCGAGCTTGAGAATATGTCAGAGGATGAGTTGCTCAACCTTTCTC
GGTCAGACTATTACTGCTGGTGCTTGGACTCAGTTCCTTGA
SEQIDNO: 159
ATGAGGACGTCTTACCATTCGGTTCATGAACCTACGTGTGGCATTTGCAACAAACACTGCCGATCTTTTGATTCCCTCCGTGAAC
ACCTCATTGGTATATCTCCAACCTCTATATATCTACTCTCTGACTCTCTAATTTGGCTTTCTAATTTCATTTAAAATCATATTGTATG
TAGGGCCATTGCCGAAACAGGAATGTAAGAACATTTTCAGCATCTGCGGCTGCAGATTCTGCCTTACGAACCTTGAAAGCCCCA
ACGCTCGTAGGATCCATCAGGAGAGATGCCAATTCTCAAACGTCAGTTATGTAATTATACACATAAGTTAATATTTTCATAAATGA
ATTAACTACAGCATATTGCTATAGGTCTCGATTTCAGACACAAAACAAGCATTTGTGCATCTTTTTGTGTTAACAAGGGTGATTGG
AATGAACTCTAGCTTTATATTTTTGGCTGTAGAATTTAAGCTATAGATTTATTTGATGTAGATTATTTTGCTGTATCTTTGTAAAGC
AATATTTTTTCTTTGGAAATAAAATTCTATACACCCATATTTTAATTTTGTAGAAATATTTTTGTTGTGAATTTTTTAAGGAAATGAAA
ACTCGATTGGTTGACATATATGGTTCTAGAGTAAATTTTGGCTGTCTAGAGCATCTACAGCCGCATCCAACGTTTTCATTTTCTGA
TGAAATATTTTATTTTGTAAATAATTTTGCAAATGATAACTTAAATAAAAACACACTACTGTATTAGAAATAAATGAAATAAAACAGT
ATATTCTTTCTATTTGTTGCTTGATACTAATATCTAAGTAACATTTCAGGGACTAACTACTCGTATGGCGGTCTTAGGCCTAAGAG
ACAATCCTACAATCGATTACACTTCTTCCAGGTCACCACGAGTGGTCGCACTCTCATGCAAGATGGTTGGAGGAGGGAGTGATG
AATCGCTTGACCTATGCGCGAGAGTTTGCATAACAGATGAGAGCGAAAACGTGATTTTTCACACGTACGTGAAGCCAACATTGC
CCATAACGAATTACAGGTACGAGACTACAGGAATACGACCTGAGAATATAAGGGACGCGATGCCATTGAAACAAGCACAGAGA
AAGATTAAGGAGTTTCTCTGTTATGGAGAACCAATGTGGAAGATTCGTCCAAGAAGTGGAAAAGCGAGGATTCTCGTGGGACAT
GGACTTGATAGCCATCTTGACTGTCTTCAAATTGAATATTCTTCTTCCATGATAAGGTAAATATACCTTTTACTACACAATTTTTTT
GGATGGTAACGACAATTTTCACTCATACCACTGGTGCAGATTAGTCCGGATTTGATTCATAATATATGATCATTAAGAAATAGAAT
ATGTATGATAAGACATATTATGTTTATTTGTAAAGAGATACTGCGGAATACCCTCCATTGATGAAAACAAGCAAGCTAAGCAACTC
GCTCAAGTACTTAACCCAAGCCTATCTGGGGTAAATATTCTTCTTCTTTTTTTGCATCTCTTTTTTTCAATTTTACAAAATTGAAAG
ACCCATAAACATGAATGGGTACATTTTTGAAATTTAATTTCAGCTAATCTGTATATAATTTTAAAAATATTCGTCACAAGTTGGTAA
ATATAACTTTACTTAAGCAAAAAAAAAAAAATTCTGTAGTTCATCTGATCAAACCTACTATCAAAGATTCCATAACTCATAAAACAA
TTATTCAACTCGGAAAAGGTTTGTCTACTAAACCATGCATGTATACAGATTACACGTTTCTATAATTTTATTTTAATTTGCCGTGTG
TAATATTCGGACGCAACAACTATAAAGTAGGTATCCGATGTACTTATGACGTGATTAAAAGTTTTTAATCCGTGTAAAGTACAATA
TGCTGATTAGCTAAAAAGTTTCTTAAAAATTCGAATAAATCAACCGATGATAATCCTAGGAATATTTCGAATAACTGACGTCTCTA
CGATTTCTATGTCTCTACCTCATACTTCGTATCTTTTATTCATAACCAAAAGTTTCGAATTTCTAATTTGCTCCTCTCGTTTATAAAA
GGTTATCCTAAAGACACAAAACTACAAAATTAGATTATTATTTTTCCTAAAATATACAATGCAGTAAAAAAGTTCTGTATATTTTAA
ACTAAAGAAATATATTTCCTCTTTGTTCAGGATTACGGATTAGTGGCAGTGGCAGAAAATAACTTATAACATCACAACTAGACTAC
TTTAATAAAATTTTGATAGGAGTCAATATTCGTTTTTGGTTGGAGTCAACATAATTTATTTGGTAAAAATAAATTGTTTTCATAAACT
TTATGGGTGTCACTTGACCCCTTCATAACACACTCTCCGCCATTGATAGTGGTAGGCTCTAGAACTTATGGTTTCTAATATAGGC
TTCATTTCAGTGCATATGGTATTTTTATGGTTTAGGGTTTATAAATAATAAACTTTGAGGTCATAAAATAATACTCATTATATTCCTG
AAATTAAGATTTTCTAGAGTTAGAGTATGCACGCTTAATAAATATTTATAATTTAATTTATTTTTTACTTTATTATACACTTTCCAATA
ACTTTCTACCAATGAAATTTAATCAATTCAAATATTCTCAATTATTGTCCTCAAAAGTATAAAAAAGTACCTTAAGAATATAGAAAAT
CTATCTTTGTGTAACAAGAAAAAAATCTAAAAAATCTAAAAAATCTTACTTTCGGGAACAGAGGGAGTATTATGAATTGGATTTAC
AGTACATTATTAATTTATAAAAGTTTATGCTATTTCCTTATTTTGATCTAAAATAAGACTGTTTAAATTAAATCTCATTTCTATCTTTT
CCGACCTTCTAAAGGTATGACATTCATGTGGGGATGCAAGATCCTTATGAGGACTGTGTCGCGACGATGAGGCTGTACAAAAGA
ATACGATATCAAAAACACAAGACGGATGCTTATCCGTTGGCCTCAGACACGCATAACACAAATAACTATGCGTCCTGGAGACAG
AGCGAGCTTGAGAATATGTCAGAGGATGAGTTGCTCAACCTTTCTCGGTCAGACTATTACTGCTGGTGCTTGGACTCAGTTCCT
TGA
SEQIDNO: 160
MDYRSSMESSETLRNKCAACYRQFNKMEHLVEHMKISYHSGHEPTCGVCKKHCRSFESLREHLIGPLPKQECKNIFSLRGCRFCMM
ILESPNARRIHQERCQFSSVNAGLTTRMAALGLRDKAMIDYTSSRSPKMVALSCKMVGGGSDGSLDLCARVCITDENDNVVFHTYVK
PSMVVTNYRYETTGIRPENLRDAMPLKHAQRKIQEFLCNGEPMWKIRPRGGKGRILVGHGLDHDLDRLQLEYPSSMMRDTAKYPPL
MKTSKLSNSLKYLTQAYLGYDIHVGIQDPYEDCVATMRLYTRMRYQKHKIEAYPLPADVQNRSNQVAWRQSEVERMSPNEMLSISRS
DYYCWCLDSLA
SEQIDNO: 161
ACACACCTAGCATAATACATTAATAAAAAAACTCATCAAAAGAATTGTTTAACTTCTCCCCACTCTTAAATTGTTGAGTTCTTTGTT
TGCATTTTCATACGTACCATGGATTACAGATCATCTATGGAGTCATCGGAAACCCTAAGGAACAAGTGCGCAGCTTGTTATAGG
CAATTCAACAAAATGGAACATTTGGTGGAACACATGAAGATCTCTTATCACTCCGGTCATGAGCCTACTTGTGGGGTTTGCAAGA
AACATTGCCGATCTTTTGAGTCACTCCGCGAACATCTCATAGGACCATTGCCAAAACAAGAATGCAAGAACATTTTTAGCCTTCG
CGGATGCAGATTCTGCATGATGATCCTCGAAAGCCCTAACGCTCGTAGGATTCATCAAGAGAGATGCCAATTTTCGAGCGTCAA
TGCTGGATTGACGACTCGTATGGCAGCGTTAGGCCTTAGAGATAAAGCCATGATCGACTACACGTCATCACGGTCTCCAAAAAT
GGTTGCACTCTCTTGCAAGATGGTAGGAGGAGGAAGCGACGGGTCGTTGGATCTATGCGCAAGGGTTTGCATAACGGATGAGA
ACGACAACGTTGTGTTCCACACGTACGTGAAACCGTCAATGGTCGTGACGAACTATAGGTACGAGACGACCGGTATACGTCCA
GAGAATCTGAGGGACGCAATGCCGTTGAAACATGCACAAAGAAAGATTCAAGAATTTCTTTGTAATGGAGAACCCATGTGGAAG
ATTCGTCCAAGAGGTGGGAAAGGGAGGATTCTCGTGGGACATGGGCTGGATCACGATCTTGACCGCCTTCAACTTGAATATCC
TTCTTCCATGATGAGGGATACTGCAAAATATCCTCCGTTGATGAAAACAAGCAAGCTGAGCAATTCTCTCAAGTACTTAACCCAA
GCCTATCTCGGGTATGATATTCATGTTGGGATACAAGACCCATACGAAGATTGTGTAGCGACGATGAGGCTTTACACGAGAATG
AGATATCAGAAACATAAGATTGAAGCATATCCTTTACCAGCCGACGTGCAGAACCGTAGCAATCAAGTGGCTTGGAGGCAGAGC
GAGGTCGAAAGGATGTCTCCTAATGAAATGCTCTCCATCTCTCGCTCCGACTACTATTGCTGGTGCTTGGACTCCCTCGCTTAA
TTCCAAAAACTATGGGGTTAAAATTTGAGAATCTCTCATAATTACTTCATAAACTTTTTCGAGATTTTTAATTTAGTAGCGTAAAGT
CGAATAAGCATTACTTCTGATTTCAAATAGTATCTAAATTAATTTTATAGTATGTGTCGTGTGAGATGCGAATGTTGTTCCTGTACT
TCTAATAACGCATATTGCTCTTAATTATTAATAATTATT
SEQIDNO: 162
ACACACCTAGCATAATACATTAATAAAAAAACTCATCAAAAGAATTGTTTAACTTCTCCCCACTCTTAAATTGTTGAGTTCTTTGTT
TGCATTTTCATACGTACCATGGATTACAGATCATCTATGGAGTCATCGGAAACCCTAAGGTAACCATTTTCATCCTAAGCGTGTG
TTATATCAAGCGTTTTAATTGAAAAAAAAAATCCCAAAGAAAAACTCAATGGAGTGGCATGCAATATCATACCCAAATTCTGTGGT
CAACTGATGAAAAATTAAGACTAAAATTATTTTTTTTTCTAAAATATATTTGTATATATATGTTAAAAATATATTGATGTATATATGTA
CACGTACAGGAACAAGTGCGCAGCTTGTTATAGGCAATTCAACAAAATGGAACATTTGGTGGAACACATGAAGATCTCTTATCA
CTCCGGTCATGAGCCTACTTGTGGGGTTTGCAAGAAACATTGCCGATCTTTTGAGTCACTCCGCGAACATCTCATAGGTAAATA
AGAAGCTATATATAAAGAGTGACATATAGTTTTATATATACGCTATGCATTTGTATGTTAATTTTTAATTGTGTAATGTCAATAGGA
CCATTGCCAAAACAAGAATGCAAGAACATTTTTAGCCTTCGCGGATGCAGATTCTGCATGATGATCCTCGAAAGCCCTAACGCT
CGTAGGATTCATCAAGAGAGATGCCAATTTTCGAGCGTCAATGCTGTACGTAATCGTATTATTGCCCTTATCTCAATACTCCTCTT
CTCATATTTGCGTAACTAAACTTGTAAATTGACCACATGAAAAAAACAATTCTTATATAAATAATGTAATATCATATGATTTGTCTTT
TTCAGGGATTGACGACTCGTATGGCAGCGTTAGGCCTTAGAGATAAAGCCATGATCGACTACACGTCATCACGGTCTCCAAAAA
TGGTTGCACTCTCTTGCAAGATGGTAGGAGGAGGAAGCGACGGGTCGTTGGATCTATGCGCAAGGGTTTGCATAACGGATGAG
AACGACAACGTTGTGTTCCACACGTACGTGAAACCGTCAATGGTCGTGACGAACTATAGGTACGAGACGACCGGTATACGTCC
AGAGAATCTGAGGGACGCAATGCCGTTGAAACATGCACAAAGAAAGATTCAAGAATTTCTTTGTAATGGAGAACCCATGTGGAA
GATTCGTCCAAGAGGTGGGAAAGGGAGGATTCTCGTGGGACATGGGCTGGATCACGATCTTGACCGCCTTCAACTTGAATATC
CTTCTTCCATGATGAGGTGACATTTCTATAAAGAAGAAAAGTAAAGAGGACACATATATATAACTAGATTCCTTATAGTGTTACTT
GGTTTCTCGCAACACAACCCAGACTTTACGTGAGTTGTTTTACGATTAACGTGAATTTCTAATATCATTTTTATATATTGGTGTGT
GTAGGGATACTGCAAAATATCCTCCGTTGATGAAAACAAGCAAGCTGAGCAATTCTCTCAAGTACTTAACCCAAGCCTATCTCG
GGTAATATATCTACTTTTGTGTTTGTAATACAACTTTCGAATATAACATTAATTTGGAAAATGAATATAGATATATGCATACTTTAC
GTGTATTGATACATAAGTGTATCATGTACTATCCATTAATTTTTTTGGTGATGTATGGGTATTGATGCTTTGTATGGGCTTAAAGC
TAAAAGGAAGGGATTCAAAACGTGAAAAGATTCATATGTTATATAATATAACCATTTTCTAACAAAAACAAAAAGAATTTACATAGT
TGGAGATTTTTAATTTACATGAGATGCTTACTAGCGTAACTTTTATCTCCAAGTTGACTGAATCAACCTATTTATTTCATTTTATTTC
CTATCAATTACAAATAGTTCAACTAGTATACCATTGTTTTGTATGTAAAATTATAGGGATGAGTGTGTATGCCTAATATCATATGTT
CCATATAATCTGTGTTCGCACCGTAGAAGTAATCTAAAACACTTGAGATCAATTAATTATACCCATTATCTAATGTACAACAATATA
TATATATTAAGGATGGTATTGATGTGCTTATAGGTATGATATTCATGTTGGGATACAAGACCCATACGAAGATTGTGTAGCGACG
ATGAGGCTTTACACGAGAATGAGATATCAGAAACATAAGATTGAAGCATATCCTTTACCAGCCGACGTGCAGAACCGTAGCAAT
CAAGTGGCTTGGAGGCAGAGCGAGGTCGAAAGGATGTCTCCTAATGAAATGCTCTCCATCTCTCGCTCCGACTACTATTGCTG
GTGCTTGGACTCCCTCGCTTAATTCCAAAAACTATGGGGTTAAAATTTGAGAATCTCTCATAATTACTTCATAAACTTTTTCGAGA
TTTTTAATTTAGTAGCGTAAAGTCGAATAAGCATTACTTCTGATTTCAAATAGTATCTAAATTAATTTTATAGTATGTGTCGTGTGA
GATGCGAATGTTGTTCCTGTACTTCTAATAACGCATATTGCTCTTAATTATTAATAATTATT
SEQIDNO: 163
MDYRSSIESSETLRNKCAACYRQFNKMEHLVVHMKISYHSGHEPTCGVCKKHCRSFESLREHLIGPLPKQECKNIFSLRGCRFCMMI
LESPNARRTHQERCQFSSANAGLTTRMAALGLRDKAMIDYTSSRSPKVVALSCKMVGGGSDGSLDLCARVCITDESDNVVFHTYVK
PSMIVTNYRYGTTGIRPENLRDAMPLKHAQRKIQEFLCNGEPMWKIRPRGGRGRILVGHGLDHDLDRLQLEYPSSMMRDTAKYPPL
MKTSKLSNSLKYLTQAYLGYDIHVGIQDPYEDCVATMRLYTRMRYQKHKTEAYPQAADAQNRSNQVAWRQNEVERMSPDEMLSISR
SDYYCWCLDSLA
SEQIDNO: 164
ATGGACTACAGATCATCTATAGAATCATCAGAAACCCTAAGGAACAAGTGCGCAGCTTGTTATAGGCAATTCAACAAAATGGAAC
ATTTAGTGGTGCACATGAAGATCTCTTATCACTCCGGTCATGAGCCTACTTGTGGCGTTTGCAAGAAACATTGCCGATCTTTTGA
GTCCCTCCGGGAACATCTCATAGGACCATTGCCAAAACAAGAATGCAAGAACATTTTTAGCCTTCGCGGATGCAGATTCTGCAT
GATGATCCTGGAAAGCCCGAACGCTCGTAGGACCCATCAAGAGAGATGTCAATTTTCGAGCGCCAATGCTGGATTGACGACTC
GTATGGCGGCCTTAGGCCTAAGAGATAAGGCCATGATCGACTACACGTCCTCGCGGTCCCCAAAAGTGGTTGCACTCTCTTGC
AAGATGGTAGGAGGAGGAAGCGACGGGTCGTTGGATCTATGCGCAAGGGTCTGCATAACGGATGAGAGTGACAACGTTGTGT
TCCACACGTACGTGAAACCGTCAATGATCGTGACGAACTATAGGTACGGGACGACCGGGATACGTCCGGAGAATCTAAGGGAC
GCCATGCCGTTGAAACATGCTCAAAGAAAGATCCAAGAATTTCTTTGTAATGGAGAACCTATGTGGAAGATTCGTCCAAGAGGT
GGGAGAGGGAGGATTCTCGTGGGACATGGGCTCGACCACGATCTTGACCGCCTTCAACTTGAATATCCTTCTTCCATGATGAG
GGATACTGCAAAATACCCTCCGTTGATGAAAACAAGCAAGCTGAGCAATTCGCTCAAGTACTTAACCCAAGCCTATCTCGGGTA
TGATATTCATGTTGGGATACAAGACCCATACGAAGATTGTGTAGCGACGATGAGGCTGTACACAAGAATGAGATATCAGAAACA
CAAGACTGAAGCTTATCCTCAAGCTGCCGACGCACAGAACCGTAGCAATCAAGTGGCTTGGCGGCAGAACGAGGTCGAGAGG
ATGTCTCCTGATGAAATGCTCTCCATCTCTCGCTCCGACTACTATTGCTGGTGCTTGGACTCCCTCGCTTGA
SEQIDNO: 165
ATGGACTACAGATCATCTATAGAATCATCAGAAACCCTAAGGTAGCCATTTTTTCATCCTACGCGTGTTGTACCATGGATCATCG
TTTAAAATATTAAAAAAGAAGACTCATGGAGCGGCATGCAATATCATACCCAAATTCTATATGTGATAAAATGATTAAAACTAAAA
AAAAAGGTAAATATATTTATATATGTACACGTGCAGGAACAAGTGCGCAGCTTGTTATAGGCAATTCAACAAAATGGAACATTTA
GTGGTGCACATGAAGATCTCTTATCACTCCGGTCATGAGCCTACTTGTGGCGTTTGCAAGAAACATTGCCGATCTTTTGAGTCC
CTCCGGGAACATCTCATAGGTAAACACGAATATCTGTATATATATATAAAGATAAATATATCGTTTTTATATACACTATGAATTAGT
ATTTTTATOTTTAATTCTGTAATTAATGTCAATAGGACCATTGCCAAAACAAGAATGCAAGAACATTTTTAGCCTTCGOGGATGCA
GATTCTGCATGATGATCCTGGAAAGCCCGAACGCTCGTAGGACCCATCAAGAGAGATGTCAATTTTCGAGCGCCAATGCTGTAA
TCTTCGTAGTTCTTATCTCAACATACTTCACTTCTCATATTTGCGTATTTTAACTTGTAAAGAATCAACCACATGAAAGATATGTTC
TTACATATATATCATATGATTTCTTCCTTTCAGGGATTGACGACTCGTATGGCGGCCTTAGGCCTAAGAGATAAGGCCATGATCG
ACTACACGTCCTCGCGGTCCCCAAAAGTGGTTGCACTCTCTTGCAAGATGGTAGGAGGAGGAAGCGACGGGTCGTTGGATCTA
TGCGCAAGGGTCTGCATAACGGATGAGAGTGACAACGTTGTGTTCCACACGTACGTGAAACCGTCAATGATCGTGACGAACTA
TAGGTACGGGACGACCGGGATACGTCCGGAGAATCTAAGGGACGCCATGCCGTTGAAACATGCTCAAAGAAAGATCCAAGAAT
TTCTTTGTAATGGAGAACCTATGTGGAAGATTCGTCCAAGAGGTGGGAGAGGGAGGATTCTCGTGGGACATGGGCTCGACCAC
GATCTTGACCGCCTTCAACTTGAATATCCTTCTTCCATGATGAGGTAACATTTCTATAAGAAAAAGATAAAGAGGATACATACTTA
TAACTATATTTCTTTCAATATAACCTATATTTTTATGTTTTTTTTTTTTTTTTTTTTTTTTTTTTTTTTTTTTTTTGGCAACTAAATAAATGA
ATGCAGTTAAGGGTAATTGAACCCAGCATTTCTAGCACTGGTAATTTCTCTTAGAACCACTAGGCTAAAGTCACTTTTTTCCTATA
TTTTTATGTTAGCTTGTTTTTTTATCGTGGAATTTCTATATCATTTTGTATGTATATTGGTGTATGTAGGGATACTGCAAAATACCC
TCCGTTGATGAAAACAAGCAAGCTGAGCAATTCGCTCAAGTACTTAACCCAAGCCTATCTCGGGTAATATATCTAGTTTTGTTTTT
GTAATATTACTTTACTTTTGAGTCTAACATATTGGAAAGTGAATATAGATGCATGCATACGTTATGTATATTGATACATATGTGAAG
CAAATATTATCAATTAATTATTTCTCTTTTTTTTGCTAACTAATTAATTCTTTCTCAAAAAAATATCATCAATTAATTTATTAGGTGTT
AACTATTCATGCTTTGTATGGCTTAAAGTTATAAGGAAGAGAGGATTCAAAACGTGAAAGATTAACATGTTTTAAAATGTATTCAT
CGACATCTACATATATATTTTATATATATACCATATTATATATAGATTGTATGGCTAAACTATCCAACAAAAAATGAAACACTTTACA
TGGTTAATTAGACATTTTTATTTTACACGAGATGCTATTACCGTAAATTTTTCTCTCCAAATCGAATACATCAACCTGCTTATTTCG
TTTTTTTTTTTGCCAATCGCAAATTATTCAAATAGTACAACAGAGTTTTTTTTTTGTATTTTAAATACTATGGATGAGTGTGTATGCC
TCCTCATATCATATGTTGCATATAATATATGTTCGTGTCTACGCACCGAATAAGTAATATAAAACATTTGAGATCAATTAGACCCA
TTATCTGATGTTCAAGATTATTAACTAATGATGATTTTTGATGGTAATTATTTAGGAAACTTAACATTTACACCCAAAAAAAACTAA
TGATGATTATTGATGTGCTTATAGGTATGATATTCATGTTGGGATACAAGACCCATACGAAGATTGTGTAGCGACGATGAGGCTG
TACACAAGAATGAGATATCAGAAACACAAGACTGAAGCTTATCCTCAAGCTGCCGACGCACAGAACCGTAGCAATCAAGTGGCT
TGGCGGCAGAACGAGGTCGAGAGGATGTCTCCTGATGAAATGCTCTCCATCTCTCGCTCCGACTACTATTGCTGGTGCTTGGA
CTCCCTCGCTTGA
SEQIDNO: 166
MDCRSMESSETLRNKCAACYKQFNKMEHLVEHMKISYHSGHEPTCGVCKKHCRSFESLREHLIGPLPKQECKNIFSILGCRFCLMILE
TPNARRIHQERCQFSSVNAGLTTRMAALGIRDKDMIDYTSSRSPKVVALSCKMVGGGSDGSLDLCARVCITDEGDNVVFHTYVKPSM
AVTNYRYEKTGIRPENLRDAMPLKHAQRKIQEFLCNGEPMWKIRPRGGKGRILVGHGLDHDLDRLQLEYPSSMIRDTAKYPPLMKTS
KLSNSLKYLTQAYLGYDVHVGIQDPYEDCVATMRLYTRMRYQKHKIEAYPLAADAHNRSNQVVWRQNEFERMSPDEMLSISRSDYY
CWCLDSLA
SEQIDNO: 167
ATGGATTGCAGATCTATGGAGTCATCGGAAACCCTAAGGAACAAATGCGCAGCTTGTTATAAGCAATTCAACAAAATGGAACATT
TAGTGGAGCACATGAAGATCTCGTATCACTCCGGTCATGAGCCTACCTGCGGCGTTTGCAAGAAACATTGCCGATCTTTTGAGT
CCCTCCGAGAACACCTCATAGGGCCATTGCCAAAACAAGAATGCAAGAACATTTTCAGCATTCTCGGATGCAGATTCTGCTTGA
TGATCCTCGAAACCCCGAACGCTCGTAGGATCCATCAAGAGAGATGCCAATTTTCGAGCGTCAATGCGGGATTGACGACTCGT
ATGGCGGCCTTAGGCATAAGAGATAAGGACATGATCGACTACACGTCGTCTAGGTCCCCAAAAGTGGTTGCACTTTCTTGCAAG
ATGGTAGGAGGGGGAAGCGACGGGTCGCTGGATCTATGTGCAAGGGTTTGCATAACGGATGAGGGCGACAATGTTGTGTTCC
ATACGTACGTGAAACCGTCAATGGCCGTGACGAACTATAGGTATGAAAAGACCGGCATACGTCCGGAGAATCTAAGGGACGCA
ATGCCCTTGAAACATGCACAAAGAAAGATTCAAGAGTTTCTTTGTAATGGAGAACCCATGTGGAAGATTCGTCCAAGAGGTGGG
AAAGGGAGGATTCTCGTGGGACATGGCCTCGATCACGATCTTGACCGCCTTCAACTTGAATATCCTTCTTCCATGATAAGGGAT
ACTGCGAAATACCCTCCCTTGATGAAAACAAGCAAGCTGAGCAATTCCCTCAAGTACTTGACCCAAGCCTATCTCGGGTATGAT
GTTCATGTTGGGATACAAGACCCATACGAAGATTGTGTAGCGACGATGAGGCTTTACACGAGAATGAGATATCAGAAACACAAG
ATTGAAGCTTATCCTTTAGCTGCCGACGCGCACAACCGTAGCAATCAAGTGGTTTGGAGGCAGAACGAGTTCGAGAGGATGTC
TCCTGATGAAATGCTTTCCATCTCTCGCTCCGACTACTATTGCTGGTGCTTGGACTCCCTCGCTTGA
SEQIDNO: 168
ATGGATTGCAGATCTATGGAGTCATCGGAAACCCTAAGGTAACCTATCCTCCATCGTACGTGTATTAGATTATATCAAGCGTTTA
TATGAAAATATCGAAAAGAACTCAGGGAGGGTGTCATCCACTATCACATCCAAATTCTATAATCAATTGATGAAAAACTAGAAATA
ATTTGTTTTCCTTAAATTATAGTTTTATACATATGTACACGTACGTGCAGGAACAAATGCGCAGCTTGTTATAAGCAATTCAACAA
AATGGAACATTTAGTGGAGCACATGAAGATCTCGTATCACTCCGGTCATGAGCCTACCTGCGGCGTTTGCAAGAAACATTGCCG
ATCTTTTGAGTCCCTCCGAGAACACCTCATAGGTAAATGATAACCTATATATATTAAGAGAAATGTATCGTTTTATACATTCACGA
CGCATATGTGTATTTATTTTTAATTGTGTTATATACATAGGGCCATTGCCAAAACAAGAATGCAAGAACATTTTCAGCATTCTCGG
ATGCAGATTCTGCTTGATGATCCTCGAAACCCCGAACGCTCGTAGGATCCATCAAGAGAGATGCCAATTTTCGAGCGTCAATGC
GGTAATCTTTTCTTCTCATATTTGCATAATTAAAATTGTTAATAATCAACCGCACAAAATATATTTATTCTTACATATATGATATGAT
TTTCTCTGTTTCAGGGATTGACGACTCGTATGGCGGCCTTAGGCATAAGAGATAAGGACATGATCGACTACACGTCGTCTAGGT
CCCCAAAAGTGGTTGCACTTTCTTGCAAGATGGTAGGAGGGGGAAGCGACGGGTCGCTGGATCTATGTGCAAGGGTTTGCATA
ACGGATGAGGGCGACAATGTTGTGTTCCATACGTACGTGAAACCGTCAATGGCCGTGACGAACTATAGGTATGAAAAGACCGG
CATACGTCCGGAGAATCTAAGGGACGCAATGCCCTTGAAACATGCACAAAGAAAGATTCAAGAGTTTCTTTGTAATGGAGAACC
CATGTGGAAGATTCGTCCAAGAGGTGGGAAAGGGAGGATTCTCGTGGGACATGGCCTCGATCACGATCTTGACCGCCTTCAAC
TTGAATATCCTTCTTCCATGATAAGGTGGCATTTCTATAAAGAAAAAATATAAAGAGGATATATATATAATAGAAAAAGACTAGCA
TAGCACCAAACCAAGTTTTTCCTCAAACTAGCACTCAAGGATCAAAGTCACAAAAATAGGTTTCATTAAAAAGATAAATATACTCT
TAGGGTTTAGAGTTAGGGGTGGAGTTTTTGAATTAGAGTTTAAAATTTTATAAAATAAAAAATAAATACTAAAAAATTAAAAATAAA
AATTAAAAAAACAGTTTCAAAAAGTATTTTTGAATTCTAAAAAGAAAATTTAAAAAAAAAATAAAAAAAAATTCGAAAAAAAATTATA
AAAAATGTCGAATCTGAAAACATATAATCTGAAACTATAAAAAAAAATTTCATTTTTTTTATTTTTATTTTATTTGTTTTTATTTATTTT
GTTTGTTAATTTAATTTTAAACCAAAAGTATTAGACATATTTTATCATTTAATGAATGTCATTTTTGTGACTTTTTCCTTCTAATGTTA
TTTTTGAGATAAAAACTCAAAAGGTGCTATTATTGACAATTGTCACTAGATTCCTTTAGTGTTACTTGAAATCTTTCAATATAGCCA
ATGATTTTATGTGTGTTTTTTATATGACGGGATTTTGTATGATCTTATTGCTGTATGTAGGGATACTGCGAAATACCCTCCCTTGA
TGAAAACAAGCAAGCTGAGCAATTCCCTCAAGTACTTGACCCAAGCCTATCTCGGGTAATATATCTAATTTTGTTTTTGTAATAAT
ATTTTCAAACCGGGTGTTGATGCTTTGTATGGGCTTAAAGTTATAAGGGAGGGCTTCAAAACGTAAGATTCACATGTTTTCTAAT
ATATTCATTTCAAAATTTACACATAAACATATATATATAGTTTGTGTGACTAGAAATATCATTGAAGTAAATAAAATGAATTCATTAT
AATAAAAACAAATTTACATGGTTAGAAATTTTACTTTACCCTAGATACTTAATACTTATTAGCGTTGATTTTCCTTACATCAACCTG
GTTATTTCATTTTCTTTTCTTTTTAACGCAAATATATAGTTCCAATAGTATATACCCTTCTTTTCTGTATGTAATATTTTAAGATTTAT
TCCTAGGTTCACCCTTTAGGTTTACCAACTAATAAGATTTTGTTATTTCATATTCGATATOTTTCAAAAAAATGAGACAAAATATTA
TCAAATTATATTATGTTTTTAAAATAAAAAAGTAAAAAAAAAAAATAATAGTAGTTACAACAAAATAATTTAAAAAAATATTTTTAAC
GTCGTCAGTAAAACACTAAACCCTAAATGCTAAACCATAAACCATTGGATAACCCCTAAACCATTAGATAAATCCTAAACTCTAAA
TCAAAAACACTAAACACTAAACCCTAAATCCTAAATCCTTGAGTGTTTTAGTGTTTAGTGTTTTGATTTAGAAATTAATATTTATCC
AAGGGCTTAGAGTTTACCCAAATGTTTAGGATTTATATATGGATTAAGATTTAGAATTTAATGTTTTGCTGACGACGTTAAATATAT
ATATATATATTTTTTTTTTTTTTTTGTAACTACTACTATTTTAAATTTATTTATTTATTAATTTTTTATTTTTAAAACATAATATAATTTG
ACAATATTTTGTTTCATTTAAAAAAAATATCAAATATAAAATAACACAATTTTATTGGTTGATAAAGCTAGAGGTTTACTCTAGGGG
GTGAACCCAAAAATAAGTCATATTTTAGGGATGAGTAGTGTGTATGCCTCATACCATATGTTCAATATATAATATATGTTCGTGTC
CATCAACCGTATAAGTAATCTAAAACACTTGAGATCAATTATATACACATTAATTGTCTAATGTTCAAGAATCAAGACCATATATTA
ATGATGATTATTGATGTGCCTATAGGTATGATGTTCATGTTGGGATACAAGACCCATACGAAGATTGTGTAGCGACGATGAGGC
TTTACACGAGAATGAGATATCAGAAACACAAGATTGAAGCTTATCCTTTAGCTGCCGACGCGCACAACCGTAGCAATCAAGTGG
TTTGGAGGCAGAACGAGTTCGAGAGGATGTCTCCTGATGAAATGCTTTCCATCTCTCGCTCCGACTACTATTGCTGGTGCTTGG
ACTCCCTCGCTTGA
SEQIDNO: 169
MDYRLSGELSETQRNKCGGCYRQFNKKEHLVEHMRTSYHSVHEPTCGICNKHCRSFDSLREHLIGPLPKQECKNIFSICGCRFCLTIL
ESPNARRIHQERCQFSNVNYGLTARMAVLGLRDNPTIDYTSSRSPRVVALSCKMVGGGSDGSLDLCARVCITDESENVIFHTYMKPT
LPITNYRYETTGIRPENIRDAMPLKQAQRKIKEFLCYGEPMWKIRPRSGKARILVGHGLDSHLDCLQLEYSSFMIRDTAEYPPLMKTSK
LSNSLKYLTQAYLGYDIHVGMQDPYEDCVTTMRLYKRMRNQKHKTDAYPLASDTHNTNNYASWRQSELESMSEDELLNLSGSDYYC
WCLDSVP
SEQIDNO: 170
GTTGGCATAAACAAAAATAAACCCATCAAAGCAAACTCTATTGACACAAAAACTGCTTGCTCAATTTACAATGGACTACAGACTG
TCAGGGGAGCTCTCAGAAACCCAAAGGAACAAGTGTGGAGGGTGTTATAGGCAATTCAACAAGAAAGAACATTTGGTGGAACA
CATGAGGACGTCTTACCATTCGGTTCATGAACCTACATGTGGCATTTGCAACAAACACTGCCGATCTTTTGATTCCCTCCGTGAA
CATCTCATTGGGCCATTGCCGAAACAGGAATGTAAGAACATTTTCAGCATCTGCGGCTGCAGATTCTGCCTTACGATCCTTGAA
AGCCCCAACGCTCGTAGGATCCATCAGGAGAGATGCCAATTCTCAAACGTCAATTATGGACTAACTGCTCGTATGGCGGTCTTA
GGCCTAAGAGATAATCCTACAATTGATTACACTTCTTCCAGGTCACCACGAGTGGTCGCACTCTCATGCAAGATGGTTGGAGGA
GGGAGTGATGGATCGCTTGACCTATGCGCGAGAGTTTGCATAACAGATGAGAGCGAAAACGTGATTTTTCACACGTACATGAAG
CCAACATTGCCCATAACGAATTACAGGTACGAGACTACAGGAATACGACCTGAGAATATAAGGGACGCGATGCCATTGAAACAA
GCACAGAGAAAGATTAAGGAGTTTCTTTGTTATGGAGAACCAATGTGGAAGATTCGTCCAAGAAGTGGAAAAGCGAGGATTCTC
GTGGGACATGGACTTGATAGCCATCTTGACTGTCTTCAACTTGAATATTCTTCTTTCATGATAAGAGATACTGCGGAATACCCTC
CATTGATGAAAACAAGCAAGCTAAGCAACTCGCTCAAGTACTTAACCCAAGCCTATCTGGGGTATGACATTCATGTGGGGATGC
AAGATCCTTATGAGGACTGTGTCACGACGATGAGGCTGTACAAAAGAATGCGAAATCAAAAACACAAGACGGATGCTTATCCGT
TGGCCTCAGACACGCATAACACAAATAACTATGCGTCCTGGAGACAGAGCGAGCTTGAGAGTATGTCAGAGGATGAGTTGCTC
AACCTTTCCGGGTCAGACTATTACTGCTGGTGCTTGGACTCAGTTCCTTGA
SEQIDNO: 171
GTTGGCATAAACAAAAATAAACCCATCAAAGCAAACTCTATTGACACAAAAACTGCTTGCTCAATTTACAATGGACTACAGACTG
TCAGGGGAGCTCTCAGAAACCCAAAGGTACTTTTTTGTGCTATTGTGTTAAATTTTGGTTTTCTTTGGATATAAGTTATACCATCT
TCGATCAGCTGATTGAATAAGGTTATTTACACCCAAAAAAAAGATTGAATAAGCTTTCCTTTCTCACATGTATGTTTTACTACTAC
CATCAACATCCAATAAATTTGGAACATAAACTATAAGTAACTTAAGTTAGGTAAAAGAAATAGGACAATCAATACACAAATCTGTA
ACACCTAAACTTATATTTACATTCTTAGAAAAACTAAATGTACCGTAAGAATACTATAAAATTGTGTATTTAGTGTGAAATAAAATA
ATTGTGAAACAAATATCACTAATCATATTCGCCCATATAGAGGCTTTAAGTAGTAGGAAAACTACTTTCGACACCATACCTCTCCA
ACATCTCTGAAGCACACAGCCATGTATCATCAGCTTTAATGGCAGAAGCCATTGCTGTCCATCGAGCGGTTTCTCTAGCCGTTTA
TTCAAACGTCCGATCCCTGGCGGTTCTATCCGATTCCTTATCTCTGATCAAGCTCTTGAAGAAGGGATGGTATCAACCTGAACTG
TTCGGTATCATGTTTGATATCTATCACTTTATGTCTTTCTTTGATGTTATCACCTTTGATTTTATTTCTTGAAACTTCAACTCTGAGG
CTGATTCTGTGGCAAAATCAGTGCTTGCTATGTCTGTAACCCACTCCACTGTTGGAGTGTAGAACCCCCTTTAAGTAATGCAATG
CTTTGTTTGATCAAAAAAAAAAAAAGTAGTAGGAAAACTAGACTGTTAATGTACCCCATCAAATCATCTGGATTTTGATTTGGAAA
TCCTCTAGTTATCAAAAAGAAAAATTGCGAGATAAACAATGATAAAAAAGTATGCATGGATGCAGGAACAAGTGTGGAGGGTGTT
ATAGGCAATTCAACAAGAAAGAACATTTGGTGGAACACATGAGGACGTCTTACCATTCGGTTCATGAACCTACATGTGGCATTTG
CAACAAACACTGCCGATCTTTTGATTCCCTCCGTGAACATCTCATTGGTATATCTCTAACCTCTATATATCTACTCTCTGACTCTC
TAATTTGGCTTTCTAATTTCATTTAAAATCATATTGTATGTAGGGCCATTGCCGAAACAGGAATGTAAGAACATTTTCAGCATCTG
CGGCTGCAGATTCTGCCTTACGATCCTTGAAAGCCCCAACGCTCGTAGGATCCATCAGGAGAGATGCCAATTCTCAAACGTCAA
TTATGTAATTATACACATAAGTTAATATTTGCATAAATGAATTAACTACAGCATATTGCTATAGGTCTCGATTTCAGACACAAAACA
AGCATTTTGTGCATCTTTTTGTGTTTACTCAGGTGATTGGGATGAACTCTAGCTTTATATTTTTGGCTATAAAATTTAAGTTGTAGA
TTTATGTGATGTAGATTATTTTTCTGTATATTTGTAAAGCATTTTTTCTCTGGAAATAAAGCTTTATATACCCACATTTTAATTTTGC
AGAGTTTTTTTTGTTGTGAGTTTTTGAAAGAAATGAAAGCTCGATTGGTTGACATATATGACTCTAGACTAAATTTTGGCTGTCTA
GAACATTTACAGCATCAACCAACGATTTCATTTTGTGATGAAATATTTTATTTTGTAAATAATTTTGCAAATGATAACTTAAATAAAA
ACACAATACTGTATTAGACATAAATGAAATAAAACAGTATATTCTTTCTATTTGTTGCTTGATACTAATATCTAAGTAACATTTCAG
GGACTAACTGCTCGTATGGCGGTCTTAGGCCTAAGAGATAATCCTACAATTGATTACACTTCTTCCAGGTCACCACGAGTGGTC
GCACTCTCATGCAAGATGGTTGGAGGAGGGAGTGATGGATCGCTTGACCTATGCGCGAGAGTTTGCATAACAGATGAGAGCGA
AAACGTGATTTTTCACACGTACATGAAGCCAACATTGCCCATAACGAATTACAGGTACGAGACTACAGGAATACGACCTGAGAA
TATAAGGGACGCGATGCCATTGAAACAAGCACAGAGAAAGATTAAGGAGTTTCTTTGTTATGGAGAACCAATGTGGAAGATTCG
TCCAAGAAGTGGAAAAGCGAGGATTCTCGTGGGACATGGACTTGATAGCCATCTTGACTGTCTTCAACTTGAATATTCTTCTTTC
ATGATAAGGTAAATATACCTTTTACTACACAATTTTTTTGGATGGTAACGACAATTTTCACTCGTACCACTGGTGCAGATTAGTCC
GAATTTGATTCATAATATATGATCATTAATAAATAGAATATGTATGATAAGACATATTATGTTTATTTGTAAAGAGATACTGCGGAA
TACCCTCCATTGATGAAAACAAGCAAGCTAAGCAACTCGCTCAAGTACTTAACCCAAGCCTATCTGGGGTAAATATTCTTCTTCT
TTTTTGCATCTCTTTTTTCTTTCAATTTTACAAAATTGAAAGACCCATAAACATGAATGGGTACATTTTTGAAATTTAATTTCAGCTC
ATCTGTATATAATTTTAAAAATATTCGCCACAAGTTGGTAAATATAACTTTACTTAAACAAAAATTCTGTAGTTCATCTGATCAAAC
CTACTATCAAAGATTCCATAATTCATAAAACAATTATTCAACTCGGAAAAGGTTTGTCTACTAAACCATGCATGTATACAGATTAC
AAGTTTCTATAATTTTATTTTAATTTGCTGTGTGTAATATTCGGACGTAACAACTATAAAGTAGGTATCCGATGTACTTATGACGTG
ATTAAAAGTTTTTAATCCGTGTAAAGTACAATATGCTGATTAGCTAAAAAGTTTCTTAAAAATTCGAATAAATCAACCGATGATAAT
CCTAGGAATATTTCGAATAACTGATATCTCTACGATTTCTATGTCTCTACCTCATACTTCGTATCTTTTATTCATAACCAAAAGTTT
CGAATTTCTAATTTGCTCCCCTCGTTTTATAAAGGTTATCCTAAAGACACAAAACAAAAAAAAATAGATTATTATTTTTCCTAAAAT
ATACAATGCAGTAAAAAATTTCTGTATATTTTAAACTAAAGAAATATATTTCATCTTTGTTCAGGATTTCGGATTAGTGGCAGTGAC
AGAAAATAACTTATAACATCACAACTAGACTACTTTAATAAAATTTTGATAGGGGTCAATATTCTTTTTTGGTTGGAGTCAACATAA
TTTATTTGGTAAAAATAAATTGTTTTCATAAACTTTATGGGTGTCACTTGACCCCTTCATAACACACTCTCCGCCATTGATTAGTG
GTAGGCTCTGTAAGAAAGAGGAAAGCTTGAAGCTTTACTTAAGTGATGAACAAAGCTTTACTCAAATAAACATACTTNNNNNNNN
NNNNNNNNNNNNNNNNNNNNNNNNNNNNNNNNNNNNNNNNNNNNNNNNNNNNNNNNNNNNNNNNNNNNNNNNNNNNNNNNN
NNNNNNNNNNNNNNNNNNNNNNNNNNNNNNNNNNNNNNNNNNNNNNNNNNNNNNNNNNNNNNNNNNNNNNNNNNNNNNNNN
NNNNNNNNNNNNNNNNNNNNNNNNNNNNNNNNNNNNNNNNNNNNNNNNNNNNNNNNNNNNNNNNNNNNNNNNNNNNNNNNN
NNNNNNNNNNNNNNNNNNNNNNNNNNNNNNNNNNNNNNNNNNNNNNNNNNNNNNNNNNNNNNNNNNNNNNNNNNNNNNNNN
NNNNNNNNNNNNNNNNNNNNNNNNNNTCTGCAACTTCGGTTTATGTTGATCATGGGCCTCAGGCCCATCTCTGTTATTAGGCT
CTAGAAGTTATGGTTTCTAATATAGGCTTCATTTTCAGTGCATATGGTATTTTTATGGTTTAGGGTTTATAAATAATAAACTTTGAG
GTCATAAAATAATATTAGGAATTGGATTTACAGTACATTATTAATTTATAAAAGTTTATGCTATTTCCTTATTTTGATCTAAAATAAG
ACTGTTTAAATTGATCTCATTTCTATCTTTTCCGACCTTCTAAAGGTATGACATTCATGTGGGGATGCAAGATCCTTATGAGGACT
GTGTCACGACGATGAGGCTGTACAAAAGAATGCGAAATCAAAAACACAAGACGGATGCTTATCCGTTGGCCTCAGACACGCATA
ACACAAATAACTATGCGTCCTGGAGACAGAGCGAGCTTGAGAGTATGTCAGAGGATGAGTTGCTCAACCTTTCCGGGTCAGAC
TATTACTGCTGGTGCTTGGACTCAGTTCCTTGA
SEQIDNO: 172
MDCRIESAETHRNKCAACFRQFNKLEHLVEHMRISYHSVHEPTCGICRKHCRSFESLREHLIGPLPKQECRDIFSYRGCKFCLKVFES
PNSRRIHQEKCQLSGTNAGIIGRFSNLGLRDNLAIGGGARGPQVVALACKMVGGGSDGSLDLCARVCLIDEHENIIFHSYVKPPIPVAN
YRYETTGITPEYLRDAMPMRHVQRRIHDFLCNGEPMWTIRARGGRARILVGHGLDHDLESLQIEYRAEKIRDTAKYPPLMKTSKLSNS
LKYLTQAYLGYDIQTGIQDPYEDCIATMRLYMRMRSQAHRVQEYPLASDPQNRNNFASWRQSEIERMSPEQMLEISRSDYYCWCLD
SLY
SEQIDNO: 173
TGAATATTGCCTTTAGGAATCGTCCATTTATGCAAGTTGGAGCAATAGTACCTCTACCCTTTCCCTATAAATATCACCCCACTCCT
ACCTTTGACCTCAAGTCCAAGTCTTTTCTATTCTATTTCTTACGTAATAATTATATAGATTAGTATAAAGAACTATGGATTGCAGAA
TAGAGAGTGCCGAAACTCACAGGAATAAGTGTGCAGCATGCTTCCGACAGTTCAACAAACTGGAGCATCTTGTGGAGCACATG
AGGATCTCATACCATTCGGTTCATGAACCAACCTGTGGCATTTGCAGGAAACACTGCAGGTCTTTTGAGTCTCTCAGGGAACAT
CTTATAGGTCCATTGCCAAAACAGGAATGCAGAGATATATTTTCCTATAGAGGGTGCAAGTTTTGTTTGAAAGTCTTTGAAAGCC
CTAACTCTCGCAGGATCCACCAAGAAAAATGCCAACTCTCTGGAACAAATGCTGGAATAATTGGTCGCTTTTCAAACTTGGGACT
TCGTGATAATTTGGCTATTGGTGGTGGAGCAAGAGGACCACAAGTAGTTGCTCTAGCATGTAAAATGGTTGGAGGCGGCAGTG
ATGGCTCACTTGATCTCTGTGCAAGAGTTTGCTTAATCGATGAACATGAGAACATAATATTCCATTCTTATGTGAAGCCACCAATT
CCTGTCGCAAACTACAGGTATGAGACAACAGGCATCACACCAGAATATCTGAGGGATGCAATGCCAATGAGACATGTTCAGAG
GAGGATTCATGACTTCCTTTGCAATGGTGAACCTATGTGGACAATTCGAGCAAGAGGTGGAAGAGCCAGGATTCTTGTGGGTCA
TGGTTTGGATCATGACCTTGAAAGTTTGCAAATAGAATATCGAGCTGAAAAAATAAGGGACACTGCAAAATACCCTCCACTGATG
AAAACAAGCAAGCTGAGCAACTCACTCAAGTACTTAACACAGGCATATCTTGGGTATGACATTCAAACTGGGATTCAGGATCCTT
ATGAGGATTGTATTGCAACGATGAGGCTCTACATGAGAATGAGATCTCAAGCACATAGAGTACAGGAATACCCTTTGGCGTCTG
ACCCTCAGAACAGGAATAATTTTGCTTCATGGAGGCAAAGTGAGATTGAAAGAATGAGTCCTGAACAAATGCTAGAAATTTCAAG
GTCTGACTACTACTGCTGGTGCTTGGATTCCTTGTATTGATCCCTGAATGGTGAAAGCCAAGTACACCAATCAGAAAGCCCATG
AACATCAGGGAATTGATCAGTACACTACTAATTTAACCGATACAAATATCTAGTATGCAAAAATAAAGTACACCAAACAGTTGTCT
CTTTTTTACTAGTCAATAATTTCTTATTT
SEQIDNO: 174
TGCAAGTTGGAGCAATAGTACCTCTACCCTTTCCCTATAAATATCACCCCACTCCTACCTTTGACCTCAAGTCCAAGTCTTTTCTA
TTCTATTTCTTACGTAATAATTATATAGATTAGTATAAAGAACTATGGATTGCAGAATAGAGAGTGCCGAAACTCACAGGAATAAG
TGTGCAGCATGCTTCCGACAGTTCAACAAACTGGAGCATCTTGTGGAGCACATGAGGATCTCATACCATTCGGTTCATGAACCA
ACCTGTGGCATTTGCAGGAAACACTGCAGGTCTTTTGAGTCTCTCAGGGAACATCTTATAGGTCCATTGCCAAAACAGGAATGC
AGAGATATATTTTCCTATAGAGGGTGCAAGTTTTGTTTGAAAGTCTTTGAAAGCCCTAACTCTCGCAGGATCCACCAAGAAAAAT
GCCAACTCTCTGGAACAAATGCTGGAATAATTGGTCGCTTTTCAAACTTGGGACTTCGTGATAATTTGGCTATTGGTGGTGGAG
CAAGAGGACCACAAGTAGTTGCTCTAGCATGTAAAATGGTTGGAGGCGGCAGTGATGGCTCACTTGATCTCTGTGCAAGAGTTT
GCTTAATCGATGAACATGAGAACATAATATTCCATTCTTATGTGAAGCCACCAATTCCTGTCGCAAACTACAGGTATGAGACAAC
AGGCATCACACCAGAATATCTGAGGGATGCAATGCCAATGAGACATGTTCAGAGGAGGATTCATGACTTCCTTTGCAATGGTGA
ACCTATGTGGACAATTCGAGCAAGAGGTGGAAGAGCCAGGATTCTTGTGGGTCATGGTTTGGATCATGACCTTGAAAGTTTGCA
AATAGAATATCGAGCTGAAAAAATAAGGGACACTGCAAAATACCCTCCACTGATGAAAACAAGCAAGCTGAGCAACTCACTCAA
GTACTTAACACAGGCATATCTTGGGTATGACATTCAAACTGGGATTCAGGATCCTTATGAGGATTGTATTGCAACGATGAGGCTC
TACATGAGAATGAGATCTCAAGCACATAGAGTACAGGAATACCCTTTGGCGTCTGACCCTCAGAACAGGAATAATTTTGCTTCAT
GGAGGCAAAGTGAGATTGAAAGAATGAGTCCTGAACAAATGCTAGAAATTTCAAGGTCTGACTACTACTGCTGGTGCTTGGATT
CCTTGTATTGATCCCTGAATGGTGAAAGCCAAGTACACCAATCAGAAAGCCCATGAACATCAGGGAATTGATCAGTACACTACT
AATTTAACCGATACAAATATCTAGTATGCA
SEQIDNO: 175
GACGAGAGTTTATGGTTGGTTTGTTTGCAACAATATTATGAAATTCATATTAAAACAACGTGACAGCCGAAGTCAATGAAAGAAA
AGAGAAATAATGGGCCCAAGAATCTGGAACATACATAGATCATTACGAATGCAATAATGCTATACGCTACCAACAAACTGCACGA
CAAGATAGAGGAGAGGAAGCATGGCCAAAGAAAAAGAAAAAAGTAGAGGAGGAATCGGAAATTAATATACTGAATATTGCCTTT
AGGAATCGTCCATTTATGCAAGTTGGAGCAATAGTACCTCTACCCTTTCCCTATAAATATCACCCCACTCCTACCTTTGACCTCA
AGTCCAAGTCTTTTCTATTCTATTTCTTACGTAATAATTATATAGATTAGTATAAAGAACTATGGATTGCAGAATAGAGAGTGCCG
AAACTCACAGGTTTTCTTAATTTCTTACATCCATGCACAAGCGCACACATGCATACATCACATATGAACGAGTGCATGTGCTTCT
ATACTATTAAACATTGAATTGCATAAAATTAAAAATGAATTATAATCAACAGTGCATGGATATGTATAAATAACAATCATGTTTTTTT
TTTTTTTTTTTGCAATAGGAATAAGTGTGCAGCATGCTTCCGACAGTTCAACAAACTGGAGCATCTTGTGGAGCACATGAGGATC
TCATACCATTCGGTTCATGAACCAACCTGTGGCATTTGCAGGAAACACTGCAGGTCTTTTGAGTCTCTCAGGGAACATCTTATAG
GTAATACTCATTCATACGATGATTAATTGTGAAGCAAATTAAGTGCATGCCCTTAGCATATATCTTCCATGAAGAATATTTATCAT
CTGATTGTGAATTTGTGATGAAACTTAATCTGCTTTTCCAGGTCCATTGCCAAAACAGGAATGCAGAGATATATTTTCCTATAGAG
GGTGCAAGTTTTGTTTGAAAGTCTTTGAAAGCCCTAACTCTCGCAGGATCCACCAAGAAAAATGCCAACTCTCTGGAACAAATG
CTGTATAACTTCTAACTATGAATCTAAAGAATTTACAAATGATTATCCTAGTAAAAATTTATTCTAATAATTTAAAAACATAAAGTAA
TATTTTTTTATTAAAAATTTGAAAAGATATTAGAATTATTAATTGCGAATTTTTAACTTTTTGTGCACATTATTACAGGGAATAATTG
GTCGCTTTTCAAACTTGGGACTTCGTGATAATTTGGCTATTGGTGGTGGAGCAAGAGGACCACAAGTAGTTGCTCTAGCATGTA
AAATGGTTGGAGGCGGCAGTGATGGCTCACTTGATCTCTGTGCAAGAGTTTGCTTAATCGATGAACATGAGAACATAATATTCC
ATTCTTATGTGAAGCCACCAATTCCTGTCGCAAACTACAGGTTAATTGGACAATTAAACTTCCTTTATATTAGGCCTTAAAGATTT
AATTTAACCATACATTTTTTTTAATTGATAAGCAGTTTAACCATAATATATACCTAACGAAGCTGCTGATTCATTAACAGGTATGAG
ACAACAGGCATCACACCAGAATATCTGAGGGATGCAATGCCAATGAGACATGTTCAGAGGAGGATTCATGACTTCCTTTGCAAT
GGTGAACCTATGTGGACAATTCGAGCAAGAGGTGGAAGAGCCAGGATTCTTGTGGGTCATGGTTTGGATCATGACCTTGAAAG
TTTGCAAATAGAATATCGAGCTGAAAAAATAAGGTAAATAGTTCAATTTAACATTTAGGCAGAACACATGCAGCATAGGTATACAC
TCTCATACATATCTCAAATTAAATAATTAATCTGTTCAGAAATTTTTGTAACTTTGTATAAGGCAAGTAAAAGAACACTTTTTATTAG
ATCCTAACTACGGTTATTTATTTGTTTATTTATATTAGCTCCTCGATCTCTAGAATCAACAACAAAGATGGATGCCATACATCAAAT
CATAGGTTTATTTCAACACATTCAAATATTGATTTTGAATTCATATTGAATAATCAGGGACACTGCAAAATACCCTCCACTGATGA
AAACAAGCAAGCTGAGCAACTCACTCAAGTACTTAACACAGGCATATCTTGGGCAAGTATCCTTCACATTTTTCTTTACTGTAAAA
TAGAAGATGCATGTATGTTGAATTCATGATATATGTTTTAATATTAATTAATTAACGAGGCTTCTGTTTTGGGGCACATATACATAT
AAGCAGGTATGACATTCAAACTGGGATTCAGGATCCTTATGAGGATTGTATTGCAACGATGAGGCTCTACATGAGAATGAGATC
TCAAGCACATAGAGTACAGGAATACCCTTTGGCGTCTGACCCTCAGAACAGGAATAATTTTGCTTCATGGAGGCAAAGTGAGAT
TGAAAGAATGAGTCCTGAACAAATGCTAGAAATTTCAAGGTCTGACTACTACTGCTGGTGCTTGGATTCCTTGTATTGATCCCTG
AATGGTGAAAGCCAAGTACACCAATCAGAAAGCCCATGAACATCAGGGAATTGATCAGTACACTACTAATTTAACCGATACAAAT
ATCTAGTATGCAAAAATAAAGTACACCAAACAGTTGTCTCTTTTTTACTAGTCAATAATTTCTTATTTTATAAATAATACTCAACTTA
AGCAGTAGCTTACGCTACTACCATAGCTAGCACCCAGTGATTAAGGTACG
SEQIDNO: 176
MDAEADPPQNPITRHKCLACYKQYKKKEHLIEHMKTSYHSVHQPRCGVCQKHCKSFESLREHLTGPLPRGICSKIFSQQGCQLCLAL
FDSPGSLIDHRKICRISAPTCPGTSALPYIDSQFDCQDFSDENHAGEGPGGAVAMDCEMVGGGSDGSLELCARVCLVDEDERLIFHT
YVQPEIPVTNYRYDITGLTEEHLRNAMPLKEVREKLLQILHNGESIGKVRLDGGKARLLVGHDLAHDLDCLKMNYPDHMLRDTAKYRP
LMKTNLVSHSLKYLTRTYLGYDIQSGTHDPYEDCISVMRLYKRIRSQLHPEEDHGTMTLSNNIVGMPDSWISRELDNLTPDELYAMSR
SDYKCWCLDLIPRLSA
SEQIDNO: 177
ACTTGAAACAGTCGCTGCTGCGTCTTCTTCATCCGTGGTGTTAGGGTTTTGGTCGGAGTAGCCTTTTGCTTCGTCCAATATTTTG
GACATGGACGCCGAAGCGGACCCTCCTCAAAACCCTATCACAAGACACAAATGCTTGGCATGCTATAAGCAATATAAGAAGAAA
GAGCATCTTATTGAGCACATGAAAACCTCGTATCATTCTGTTCATCAGCCAAGATGTGGGGTATGTCAAAAGCACTGCAAATCTT
TTGAGTCTCTGAGGGAACATCTTACTGGTCCTTTGCCAAGAGGAATTTGTTCAAAGATTTTCTCTCAACAGGGCTGTCAACTTTG
CCTGGCACTATTTGATAGTCCCGGGTCTCTCATTGATCATAGAAAAATATGTCGCATATCTGCCCCTACTTGTCCAGGAACAAGC
GCATTGCCCTATATTGATTCCCAGTTTGATTGTCAAGATTTTTCTGATGAAAACCATGCTGGCGAGGGCCCTGGAGGAGCAGTT
GCAATGGACTGTGAAATGGTTGGTGGTGGAAGTGATGGTTCTCTGGAACTTTGTGCTAGAGTGTGTTTGGTTGATGAAGATGAG
AGATTAATCTTCCATACTTATGTACAGCCTGAAATACCTGTTACTAATTACAGATATGATATAACTGGATTGACAGAAGAGCATCT
TAGAAATGCCATGCCACTTAAGGAAGTTCGAGAAAAGCTACTGCAAATTCTACACAATGGAGAATCCATTGGCAAAGTTAGACT
GGATGGTGGAAAAGCAAGGCTTCTTGTGGGGCATGACTTAGCACACGATTTGGATTGTTTAAAAATGAATTATCCTGATCATATG
CTGAGAGACACTGCAAAGTACCGTCCGTTGATGAAAACCAACTTGGTCAGCCATTCACTCAAGTATCTCACCCGAACATATCTT
GGTTATGATATCCAATCCGGCACTCATGACCCTTATGAAGATTGTATTTCTGTCATGAGACTATACAAGAGAATACGATCTCAAC
TTCATCCGGAGGAAGACCATGGAACAATGACCCTGAGTAACAACATTGTTGGCATGCCTGATAGCTGGATATCTAGGGAACTTG
ACAACCTCACACCGGATGAACTTTATGCCATGTCTAGATCAGATTATAAGTGTTGGTGCTTGGATTTGATACCAAGATTGTCAGC
CTGAATTATTGATCTTTGCATTTGTCCATAACATATCATAAGCATATTTCTTCAAGAACTATGAGAATGGAGCATTTGCAATGATAT
TTTCTGTGCATATCTTCCTATGCATCGAGTTATCTTCCAGACAAGAAAATTACGAGAAAAGATAGGTGCTTTATGATGGAGCTTTT
GTAAATATTTAGAACGCTTTGTTCAAATCACATGCCCTTTTTTAGAATGAAGACTT
SEQIDNO: 178
ACTTGAAACAGTCGCTGCTGCGTCTTCTTCATCCGTGGTGTTAGGGTTTTGGTCGGAGTAGCCTTTTGCTTCGTCCAATATTTTG
GACATGGACGCCGAAGCGGACCCTCCTCAAAACCCTATCACAAGGTCAATTTTTGCTCCCTCACTTTAATTTTTTTTTTTTCCATG
ATGATCACCGTGTTGCTTCTGGAGGTAGCCGTTGATCGGAAATTCAAACATTGTCATAAAATAAATTAGGAAAAATGTTAAAATC
AAACTCATTTAATTTTTAAATTGGTTATTACTGCACTTTAGAGGACTCCGTCTCTCATGTGAAAGAATATTCTAGTTACTTTTCTCA
GCCCGTTTGTGGTCACTTTTTTTTTTTTTTTATTCCCTTGGGTATAATTGTTTATTTGCTTAGTTTCTTTGAAGAATACTAACTTATT
TCTCCCTACAGACACAAATGCTTGGCATGCTATAAGCAATATAAGAAGAAAGAGCATCTTATTGAGCACATGAAAACCTCGTATC
ATTCTGTTCATCAGCCAAGATGTGGGGTATGTCAAAAGCACTGCAAATCTTTTGAGTCTCTGAGGGAACATCTTACTGGTGAGTC
ATTTGTGCATTCAATCTCTGATGTCTACAGTATTGGTTTCATGTTTTAGCTCATTATTTATCCTTTTTCGTGCCTCTTTTCTTCCAT
GTTTTAGGTCCTTTGCCAAGAGGAATTTGTTCAAAGATTTTCTCTCAACAGGGCTGTCAACTTTGCCTGGCACTATTTGATAGTC
CCGGGTCTCTCATTGATCATAGAAAAATATGTCGCATATCTGCCCCTACTTGTCCAGTAAGTTGATTATTGGCAACGTAAAGCAT
TTATATTTATATTTAAAATAAAATGTCTTATGTGTGTTATTCACCCTAAGTAATCAAAGAAACCTGCTTACAATCATTGTTTCTTGTC
TACTCTTTTTATGTTCTTATTAGGAAGTTTATGTTGTGTGTGGAACTGTTGCAGGGAACAAGCGCATTGCCCTATATTGATTCCCA
GTTTGATTGTCAAGATTTTTCTGATGAAAACCATGCTGGCGAGGGCCCTGGAGGAGCAGTTGCAATGGACTGTGAAATGGTTGG
TGGTGGAAGTGATGGTTCTCTGGAACTTTGTGCTAGAGTGTGTTTGGTTGATGAAGATGAGAGATTAATCTTCCATACTTATGTA
CAGCCTGAAATACCTGTTACTAATTACAGGTACTTTTTTGCTCTATTTCTCTTTTATGTCTATCCTTCCTATTTTTTACTCTTTCTTT
CACTTCTAATCCACACAAAGCATTATTGTCAAAGAGAAAAGTGGACAAGGAAAAAAGAGTGCTTGGGTTGATTTTGTTTGTTATTT
TCAGATATGATATAACTGGATTGACAGAAGAGCATCTTAGAAATGCCATGCCACTTAAGGAAGTTCGAGAAAAGCTACTGCAAAT
TCTACACAATGGAGAATCCATTGGCAAAGTTAGACTGGATGGTGGAAAAGCAAGGCTTCTTGTGGGGCATGACTTAGCACACGA
TTTGGATTGTTTAAAAATGAATTATCCTGATCATATGCTGAGGTAGATGCTTCTTGAGTAACTTAGTTATGCTTAAATCATGCTTGA
CAGAATCATTCTTGACAACCATGTCTTGTACTTATCTTCTTTATCAGAACTTTTAGGATTTGTCATGATGATGAACAAAACAATTAT
TCTGTTTTTTCCCTTTTTTTCATATACAAGGTTACAATGTGTTTTTATGAATTCACTTTTTGAACTATAAAGTTGTTATACTGCTCAG
TTTTTCTTGTTATCCAAAATAAGTTTCCAGACTTTAAAGATCCAGACCATTCGATCGCTTAGATTTATATTATATTGTGAATTATGC
CAGGTTGATTGAATTTTCTATTTGAATTGACAGTTTCTTATATGAGAGCAGATCTGTGTAATTATTAGAACTCATCTTTTGCCTATG
CTTTTGTGTTACATTGCAGAGACACTGCAAAGTACCGTCCGTTGATGAAAACCAACTTGGTCAGCCATTCACTCAAGTATCTCAC
CCGAACATATCTTGGGTAAGTTAATTTTTTCCTCAATCCTTTTTCAGTCGTAAATTGCTTCTTCCATTTTCAAGTTTTCCTTCTGTTT
TTAAAATCAAATTGGCATGATCTAATCTGTTCCTCCTGCATGTACCAATTGTACATTGACCGTCATTTCAATTTGCTGAGGATCAT
AATAGATTCTATGAATCTTCTTTCTATAATAAAATAAAATGAAATTGGTGAGCAAAACTTTCTGATCTTGAAAGAATTTCAAAACCA
GGTTAAAAAGCAATTTGGCTACATTTCAGTCAAATGCATTTTGTTTTAAATTTCTGTTTGAAAATTAAAAATTAAAAACTCATAATC
ATCTTAAACAAGCCCAAAGTTATTGCATGTGTGAGTGTGTCCTGTAAGTTGGGACAGTTCTCCGGACGGTTAAGAGTATTAGTG
CAATATAAAGAAATCTGCTATATTTTTTCTTTAGTCTTTACCTTGATCTCCTACTTCTTTGTAAACATCATCTGGTAAAAAACACATC
AATTCTATTTTTCCACATTCTGGCTAAAGCAGCAAATCTATCACAAAAGGCTGCATCCATACTTTTTTGTTTTACTTTTAAATTGCC
ATAGTCACTGCTTTCATAATATAACCGCTAGCTACTATATTAATTGCAGATCCCGTAATGTTTAATCTCATCCAGTATTATTGTTCT
TTGGTTTACAGTTATGATATCCAATCCGGCACTCATGACCCTTATGAAGATTGTATTTCTGTCATGAGACTATACAAGAGAATACG
ATCTCAACTTCATCCGGAGGAAGACCATGGAACAATGACCCTGAGTAACAACATTGTTGGCATGCCTGATAGCTGGATATCTAG
GGAACTTGACAACCTCACACCGGATGAACTTTATGCCATGTCTAGATCAGATTATAAGTGTTGGTGCTTGGATTTGATACCAAGA
TTGTCAGCCTGAATTATTGATCTTTGCATTTGTCCATAACATATCATAAGCATATTTCTTCAAGAACTATGAGAATGGAGCATTTG
CAATGATATTTTCTGTGCATATCTTCCTATGCATCGAGTTATCTTCCAGACAAGAAAATTACGAGAAAAGATAGGTGCTTTATGAT
GGAGCTTTTGTAAATATTTAGAACGCTTTGTTCAAATCACATGCCCTTTTTTAGAATGAAGACTTACCTACCTTCTCACTATAATAT
AGGCTCTAACTACCGACACAAAACATAAATGGATGCAAGGCTTGTGT
SEQIDNO: 179
MDAEADPPQNPITRHKCLACYKQYKKKEHLIEHMKTSYHSVHQPRCGVCQKHCKSFESLREHLTGPLPRGICSKIFSQQGCQLCLAL
FDSPGSLIGHRETCRLSAPTCPGTSALPYIDSQFDCQDSSDENHAGEGPGGAVAIDCEMVGGGSDGSLELCARVCLVDEDERLIFHT
YVQPEIPVTNYRYDITGLTEEHLKNAIPLKKVREKLLQILQNGESIGKVRLDGGKARLLVGHDLAHDLDCLKMNYPDHMLRDTAKYRPL
MKTNLVSHSLKYLTRTYLGYDIQSGTHDPYEDCISVMRLYKRIRSQLHPEEDHGTMTLSNNIVGMPDSWISRELDNLTPDELYAMSRS
DYKCWCLDLIPRLSA
SEQIDNO: 180
AAAAAGTAATAGTTATAATTTTAGAAAAATTAATTTTAAGAGAACAAGATATGCTGAATTGGAGCATTTACCTTAAAAAATTTCTCG
GTGGCGTTTTGACTTGAAACAGTCGCTGCTGCGTCTTCTTCTTCTTCATCCGTGGCGTTAGGGTTTTGGTCGGAGTAGCCGTTC
CCCATGGACGCCGAAGCTGACCCTCCTCAAAACCCTATCACAAGACACAAATGCTTGGCATGCTATAAGCAATATAAGAAGAAA
GAGCATCTTATTGAGCACATGAAAACTTCGTATCATTCTGTTCATCAGCCAAGATGCGGGGTCTGTCAAAAGCACTGCAAATCTT
TTGAGTCTCTGAGGGAACATCTTACTGGTCCTTTGCCAAGAGGAATTTGTTCAAAGATTTTCTCTCAACAGGGCTGTCAACTTTG
TCTGGCACTATTTGATAGTCCCGGGTCTCTCATTGGTCATAGAGAAACATGTCGCTTATCTGCCCCTACTTGTCCAGGAACAAGT
GCATTGCCCTATATAGATTCCCAGTTTGATTGTCAAGATTCTTCTGATGAAAACCATGCTGGGGAGGGCCCTGGAGGAGCAGTT
GCAATAGACTGTGAAATGGTTGGTGGTGGAAGTGATGGTTCTCTGGAACTTTGTGCTAGAGTGTGTTTGGTTGATGAAGATGAG
AGATTAATCTTTCATACATATGTACAGCCTGAAATACCTGTTACTAATTACAGATATGATATAACTGGATTGACAGAAGAGCATCT
CAAAAACGCCATTCCACTTAAGAAAGTTCGAGAAAAGCTACTGCAAATTCTACAGAATGGGGAATCCATTGGCAAAGTTAGACT
GGATGGTGGAAAGGCCAGGCTTCTTGTGGGGCATGACTTAGCACACGATTTAGATTGCTTAAAAATGAATTATCCTGATCATAT
GCTGAGAGACACTGCAAAGTATCGTCCTTTGATGAAAACAAATTTGGTCAGCCATTCGCTCAAGTATCTCACCCGAACATATCTT
GGTTATGATATCCAATCCGGCACTCATGACCCTTATGAAGATTGTATTTCTGTCATGAGACTATACAAGAGAATACGATCTCAAC
TTCATCCGGAGGAAGACCATGGAACAATGACTCTGAGTAACAACATTGTTGGCATGCCTGATAGCTGGATATCTAGGGAACTTG
ACAACCTCACACCAGATGAACTTTATGCCATGTCAAGATCAGATTATAAGTGTTGGTGCTTGGATTTGATACCAAGATTGTCAGC
CTGAATTATTGATCTTTGCATTTGTCCATAACATATCATAAGCATATTTCTTCAAGAACCATGGGAATGGAGCATTTGCAATGATA
TTCTCTGTGCATATCTTTCTATGCATCGAGTTATCTTCCGGACAAGAAAATTATGAGAAAAGATAGGGGTGCTTAATGATGGAGC
TTTTGTAAATATTTAGAACGCTTTGTTCAAATCACATGCCCTTGTTTAGAATGAAGACTTACCTACCTTCTCATTATAATATAGGCT
CGAACTACCGACAAAAAAACATAAATGGATGCAAGGCTTGTTCTTGATCCAATTTAAACGGAGCCACTTAGATCTAAATTGCTGA
TTGGTGGTACAAGGAGCTTTCGTTGTCAAAAAAATTGATTTCAAATACAAAATGTGTTAAGTAATTATTTAATTTTCTT
SEQIDNO: 181
CTAACCTGCAAACACCCCTGGCAGTACTTATCATAGGCGGTTTAGGTAGTTGGTTATGTAGAGTGGGTGACTATTATAAATGCTT
GGTGCCGTGGATTAAAAAAAAAAAAAAGTAATAGTTATAATTTTAGAAAAATTAATTTTAAGAGAACAAGATATGCTGAATTGGAG
CATTTACCTTAAAAAATTTCTCGGTGGCGTTTTGACTTGAAACAGTCGCTGCTGCGTCTTCTTCTTCTTCATCCGTGGCGTTAGG
GTTTTGGTCGGAGTAGCCGTTCCCCATGGACGCCGAAGCTGACCCTCCTCAAAACCCTATCACAAGGTCAATTTTCTGCTCCTC
AATTCTCCCTCACTTTAATTTTTTATATTTTATTTCATTTTCCATTATGATCTCCGTGTTGCTTCTGGAGGTAGCCGTTGATCGGAA
ATTCAAACATTGTCATAAGTAAATTAGAAAAATGTTAGAATCAAACTCACTGAATTTTTAAATTGGTTATTACTGCATTTTGTTCTCT
ACTGCACTCTAGAAGAGTCACTTATGTGAAAGAATATTCTAGTTACTTTTCAGTCCGTTTGTGGGACTAATGAGTATCTGCTATAT
ATAATTGCCAGAATTGGCTATATATAATGAATGATGGAATGAAATGTTCCGTGGTTCTGAGTAGATTTAAATATATTGAAATCAGT
GCTCTCTTTTGGGTATAATTGTTTATTTGCTTAGTTTCTTTGAAGAATAACTTATTTCTCCCTACAGACACAAATGCTTGGCATGCT
ATAAGCAATATAAGAAGAAAGAGCATCTTATTGAGCACATGAAAACTTCGTATCATTCTGTTCATCAGCCAAGATGCGGGGTCTG
TCAAAAGCACTGCAAATCTTTTGAGTCTCTGAGGGAACATCTTACTGGTTAGTCATTTCTGTACTCAATCTCTCATGTCAACAGTA
TTTATTGGTTTCATGTTTTAGCTCATTATTTATCCTTTTTTTTTCCTCTATGTTTTAGGTCCTTTGCCAAGAGGAATTTGTTCAAAGA
TTTTCTCTCAACAGGGCTGTCAACTTTGTCTGGCACTATTTGATAGTCCCGGGTCTCTCATTGGTCATAGAGAAACATGTCGCTT
ATCTGCCCCTACTTGTCCAGTAAGTTGATTATTGGCAACCTAAAGCATTTATATTTATATTTAAAATAAAATGTCTTATGTGTACTA
TTCACCCTAAGTAATCAAAGAAACCTGCTCACAATCAGTGTTTCTTGTCTACTCTTTATGTTCCTATTAGGAAGTTTATGTTGTGTA
TGGAACTGTTGCAGGGAACAAGTGCATTGCCCTATATAGATTCCCAGTTTGATTGTCAAGATTCTTCTGATGAAAACCATGCTGG
GGAGGGCCCTGGAGGAGCAGTTGCAATAGACTGTGAAATGGTTGGTGGTGGAAGTGATGGTTCTCTGGAACTTTGTGCTAGAG
TGTGTTTGGTTGATGAAGATGAGAGATTAATCTTTCATACATATGTACAGCCTGAAATACCTGTTACTAATTACAGGTACTTTTTTT
TTTCTATTTCTCTTTTATGTCTATCCTTCCTATTTCTATACTCTCTOTTTCACTTCTAATCCACACAAAGCATTATTGTCAAAGAGAA
AAGTGGACAGGGAAAAGAGAGTGTTTGGGTTGATTTTGTTTGATATTTTCAGATATGATATAACTGGATTGACAGAAGAGCATCT
CAAAAACGCCATTCCACTTAAGAAAGTTCGAGAAAAGCTACTGCAAATTCTACAGAATGGGGAATCCATTGGCAAAGTTAGACT
GGATGGTGGAAAGGCCAGGCTTCTTGTGGGGCATGACTTAGCACACGATTTAGATTGCTTAAAAATGAATTATCCTGATCATAT
GCTGAGGTAGATGCTTCTTGAATAACTTAGTTATGCTAAATCAAGCTTGACAGAATCATTCTTGACAACCATGTCTTGCACTTATT
TTTTTTATCAGAACTTTTAGGATTTGTCATGATGATGAACAAAACAATTATTATGTTTTTTTTCCCTTTTTTTTTCATATACAAGGTT
ACAATGTGTTTTTATGAATTCACTTTTTAAACTATATAGTTGTTATACTGCTCAGTTTTTTTTGTTATCCAAATTAAGTTTCCGGACT
TTAAAGATCCATACTATTCAATTGCTTAGATTTTTATTATATTGTGAATTATGCCAGGTTGATTGAATTTTCTATTTGAATGGACAG
TTTCTTATTTGAGAGCAGATCTGTGTAAATTATTAGAACTCATCTTTTGCCTATGCTTTTGTGTTGCATTGCAGAGACACTGCAAA
GTATCGTCCTTTGATGAAAACAAATTTGGTCAGCCATTCGCTCAAGTATCTCACCCGAACATATCTTGGGCAAGTTAATTTTTTCC
TCAATCCTTTTTCAGTCATAAATTGCTTCTTCCAATTTCAAGTTTTTCTTCTGTTTTTATAATCAGATTGGCATGATCTAATCGGTTC
CTCCTGTATGTACAATTGTACATTGACCATCATTTCAATTTTCTCAGGATCATAATAGACTCTATGAAACATCTGTCCATGATAAAA
TAAAATGAAATTGGTGAGCAAAACTTTCTGATTTTGAAAGAATTTCAAAACCAAGTTAAAAATCAATTTGGCTCCATTTCAATTAGA
TGCATTTTGTTTCGAAATTTATGTTTGAAAATAAAAAATTAAAAACTCATAATCATCTTAAACAAGCCCAAAGTTATTGCACGTGTG
AATGTGTCATGTAAGTTGGGAAAGATCTCCGGATGGTTAGGAGTATTAGTGTAATATAAAGATATCTGCTTTATTTTTTCTTTAGT
CTTTACCTTGATCTCCTACTTTTTAGTAAACATCATCTGGTATAAACACATTAATTCAGTAGTTTTCCACATTTCTGGCTAGAGCAG
CAAACCTATCACAAATGCTGCATCAATACTTTTTTGTTTAACTTTTAAATTGCGATAGCTACTGCTTTCATAATATAACCTGTAGCT
ACTATATTAATTGCAGATCCCATAATTTTTAATCTCATTTCCAGTATTATTGTTCTTTGGTTTACAGTTATGATATCCAATCCGGCA
CTCATGACCCTTATGAAGATTGTATTTCTGTCATGAGACTATACAAGAGAATACGATCTCAACTTCATCCGGAGGAAGACCATGG
AACAATGACTCTGAGTAACAACATTGTTGGCATGCCTGATAGCTGGATATCTAGGGAACTTGACAACCTCACACCAGATGAACTT
TATGCCATGTCAAGATCAGATTATAAGTGTTGGTGCTTGGATTTGATACCAAGATTGTCAGCCTGAATTATTGATCTTTGCATTTG
TCCATAACATATCATAAGCATATTTCTTCAAGAACCATGGGAATGGAGCATTTGCAATGATATTCTCTGTGCATATCTTTCTATGC
ATCGAGTTATCTTCCGGACAAGAAAATTATGAGAAAAGATAGGGGTGCTTAATGATGGAGCTTTTGTAAATATTTAGAACGCTTT
GTTCAAATCACATGCCCTTGTTTAGAATGAAGACTTACCTACCTTCTCATTATAATATAGGCTCGAACTACCGACAAAAAAACATA
AATGGATGCAAGGCTTGTTCTTGATCCAATTTAAACGGAGCCACTTAGATCTAAATTGCTGATTGGTGGTACAAGGAGCTTTCGT
TGTCAAAAAAATTGATTTCAAATACAAAATGTGTTAAGTAATTATTTAATTTTCTT
SEQIDNO: 182
GAGAACAAGATATGCTGAATTGGAGCATTTACCTTAAAAAATTTCTCGGTGGCGTTTTGACTTGAAACAGTCGCTGCTGCGTCTT
CTTCTTCTTCATCCGTGGCGTTAGGGTTTTGGTCGGAGTAGCCGTTCCCCATGGACGCCGAAGCTGACCCTCCTCAAAACCCTA
TCACAAGACACAAATGCTTGGCATGCTATAAGCAATATAAGAAGAAAGAGCATCTTATTGAGCACATGAAAACTTCGTATCATTC
TGTTCATCAGCCAAGATGCGGGGTCTGTCAAAAGCACTGCAAATCTTTTGAGTCTCTGAGGGAACATCTTACTGGTCCTTTGCC
AAGAGGAATTTGTTCAAAGATTTTCTCTCAACAGGGCTGTCAACTTTGTCTGGCACTATTTGATAGTCCCGGGTCTCTCATTGGT
CATAGAGAAACATGTCGCTTATCTGCCCCTACTTGTCCAGGAACAAGTGCATTGCCCTATATAGATTCCCAGTTTGATTGTCAAG
ATTCTTCTGATGAAAACCATGCTGGGGAGGGCCCTGGAGGAGCAGTTGCAATAGACTGTGAAATGGTTGGTGGTGGAAGTGAT
GGTTCTCTGGAACTTTGTGCTAGAGTGTGTTTGGTTGATGAAGATGAGAGATTAATCTTTCATACATATGTACAGCCTGAAATAC
CTGTTACTAATTACAGATATGATATAACTGGATTGACAGAAGAGCATCTCAAAAACGCCATTCCACTTAAGAAAGTTCGAGAAAA
GCTACTGCAAATTCTACAGAATGGGGAATCCATTGGCAAAGTTAGACTGGATGGTGGAAAGGCCAGGCTTCTTGTGGGGCATG
ACTTAGCACACGATTTAGATTGCTTAAAAATGAATTATCCTGATCATATGCTGAGAGACACTGCAAAGTATCGTCCTTTGATGAAA
ACAAATTTGGTCAGCCATTCGCTCAAGTATCTCACCCGAACATATCTTGGTTATGATATCCAATCCGGCACTCATGACCCTTATG
AAGATTGTATTTCTGTCATGAGACTATACAAGAGAATACGATCTCAACTTCATCCGGAGGAAGACCATGGAACAATGACTCTGAG
TAACAACATTGTTGGCATGCCTGATAGCTGGATATCTAGGGAACTTGACAACCTCACACCAGATGAACTTTATGCCATGTCAAGA
TCAGATTATAAGTGTTGGTGCTTGGATTTGATACCAAGATTGTCAGCCTGAATTATTGATCTTTGCATTTGTCCATAACATATCAT
AAGCATATTTCTTCAAGAACCATGGGAATGGAGCATTTGCAATGATATTCTCTGTGCATATCT
SEQIDNO: 183
MDSRRESSETLRNKCAACFRQYNRMEHLVEHMKVSYHSVHEPRCGVCGKHCRSLESLREHLIGPLPKVECARVFGVRGCSICLNVL
DSSAAVRYHRAACQYSRAAPMPRGGSMTGRAVALACKMVGGGSDGSMDLCARVCLVGEDEHVIFQTYVKPTLPVTNYRYEVTGIR
PEYLRDAMPLKVAQRRIQEILCNGESLWKLRPRSYGRAKVLVGHGLDHDLERLGLEYPAFMIRDTAKYPPLMKTSKLSNSLKYLTQAY
LGYDIHTGIQDPYEDCVATMRLYIRMRSQAHQRDYNSGSGEAQNNYPAWRQRELDRMSPEELLALSASDYYCWCLDY
SEQIDNO: 184
ATCGCCAGCCTCGAGATCGATCTCTCTCAAGGGACCTTGCTTGCCGCCACCCCCACCGCAGTTACAGTTATAGCTAGGGATCT
GAGGACTAGCTGATGGACAGCAGGAGGGAGTCCTCGGAGACCTTGAGGAACAAATGCGCAGCCTGCTTCAGGCAGTACAACA
GGATGGAGCACCTGGTGGAGCACATGAAGGTCTCGTACCACTCGGTGCACGAGCCCAGGTGCGGCGTCTGCGGGAAGCACT
GCCGCTCCTTGGAGTCGCTCAGGGAGCATCTCATCGGGCCGTTGCCCAAGGTGGAGTGCGCGCGGGTCTTCGGCGTCCGCG
GCTGCAGCATCTGCCTCAACGTTCTCGACAGCAGCGCCGCCGTCAGATACCACCGTGCGGCCTGCCAGTACTCTCGTGCTGCT
CCGATGCCCAGGGGCGGTAGCATGACTGGGCGCGCGGTCGCCCTGGCTTGCAAGATGGTAGGGGGAGGAAGCGACGGCTC
CATGGACCTTTGTGCGAGGGTGTGCCTCGTTGGAGAAGATGAGCACGTCATCTTCCAGACCTATGTCAAACCTACACTCCCTGT
CACGAACTACAGGTATGAAGTGACTGGGATAAGGCCAGAGTACCTGAGGGACGCAATGCCGCTCAAGGTTGCGCAGAGAAGA
ATCCAGGAAATCCTGTGCAACGGGGAGTCACTGTGGAAGTTACGCCCAAGAAGCTATGGTAGGGCAAAGGTACTCGTTGGTCA
TGGCCTCGACCATGACCTTGAGCGCCTAGGGTTAGAGTACCCGGCATTCATGATCAGGGATACTGCAAAATACCCACCACTAAT
GAAGACTAGCAAGCTGAGTAACTCCCTCAAGTACCTTACACAAGCATACCTCGGGTATGACATCCATACTGGCATTCAGGACCC
CTACGAGGACTGCGTCGCAACAATGAGGCTGTACATCAGGATGAGATCACAGGCTCACCAGAGAGATTACAACTCCGGCTCTG
GCGAGGCCCAGAACAACTATCCAGCCTGGAGGCAGAGGGAGCTCGACAGGATGAGCCCAGAAGAACTCCTGGCACTTTCAGC
ATCAGACTACTACTGCTGGTGCCTGGATTACTAAACCGATCGGCTTATAAGGAAAATAAGGCAGGCGAACGTTGTCGGTTGACA
TGTTCCGTCTATGGCGATCATCTTTAGATGTACAAGTAGCTTGCGGCTTTGCTATATTGGGGGTTAATTAAAGCGTATAAACAAA
GGATTCTATATAAATGTATTGATGCCTTAGATCTGTATAAGAAGCAATATCATGATTTATGATGCATGTGGAAAGAGGATTTTCCT
GCT
SEQIDNO: 185
ATCGCCAGCCTCGAGATCGATCTCTCTCAAGGGACCTTGCTTGCCGCCACCCCCACCGCAGTTACAGTTATAGCTAGGGATCT
GAGGACTAGCTGATGGACAGCAGGAGGGAGTCCTCGGAGACCTTGAGGTAAGAGAGATGCTATTCTTTCAGCTGTCATTGATA
TGCGTACTGCAAATGGCCGTGTGCAGGACTGATTAAGCGCATGCCATATACTGCACCTGTCCCTTGTGGGGGATATATATACAT
ATTAAACACTACTCCTATTATTATTCTAACAAGACATCAAGTCAGTTCACTGATCTATGTAATTAATAAGGCTTGACACATGCATG
GCCATTTCTTGTAACCATGATCCTGTAAAGAGACTGTGGTTGCGAGGAGGCCGGGCTAGCTGTTCATGCATGAAACTGCTCGTG
CAAGGATCAGCTTGGCGCCCTCTCGCATTGGATAGATCCTACATATGTTCCTGAAGGCCAGAATCCATACATACATGATGAATG
ATCTCATACATGTCATGTCCATGACCATCAGGAACAAATGCGCAGCCTGCTTCAGGCAGTACAACAGGATGGAGCACCTGGTG
GAGCACATGAAGGTCTCGTACCACTCGGTGCACGAGCCCAGGTGCGGCGTCTGCGGGAAGCACTGCCGCTCCTTGGAGTCGC
TCAGGGAGCATCTCATCGGTACGTACGTACTGCAGAAACAAAGCTCTCTGCCCCGAAGAAACCAAAAGACGTACGTACAGGCG
TGGTTTCGATCAGTTCTGACGCTTCTTCGATTCTTCCTGTTCTCCACCGTACCGTGTCTCCAGGGCCGTTGCCCAAGGTGGAGT
GCGCGCGGGTCTTCGGCGTCCGCGGCTGCAGCATCTGCCTCAACGTTCTCGACAGCAGCGCCGCCGTCAGATACCACCGTGC
GGCCTGCCAGTACTCTCGTGCTGCTCCGGTACGATGCGTGGTCACCTGATATCACTTGAGAGCTCGATCGGATGCATTGCCTT
CCATCGCCTTTTGCCTGTGGCTTTTGGTCAGTAGTACTAGCTAGATTCTGATATTGTTTTCCACTCCACCATCGTGGTCCCAGAT
GCCCAGGGGCGGTAGCATGACTGGGCGCGCGGTCGCCCTGGCTTGCAAGATGGTAGGGGGAGGAAGCGACGGCTCCATGG
ACCTTTGTGCGAGGGTGTGCCTCGTTGGAGAAGATGAGCACGTCATCTTCCAGACCTATGTCAAACCTACACTCCCTGTCACGA
ACTACAGGTAATCCTCCTACTTCTCGTGCAGTTGCCATCATGTCCGTTACTAAGTTGGCCATCTTTCAGCGAGTACTATACCATA
TGGAGTATATGATAGACGTTGCCGGATCCTATTAAAATAAAGATAAAGAGTAGTTACAGCTGGGAGTAGAAAGAAATTTCGTTCC
ATGTCCTTGAAAGTTGAAGCTGACCGGAAGATGACTATGTGTGTAACATGTTTTCAGGTATGAAGTGACTGGGATAAGGCCAGA
GTACCTGAGGGACGCAATGCCGCTCAAGGTTGCGCAGAGAAGAATCCAGGAAATCCTGTGCAACGGGGAGTCACTGTGGAAG
TTACGCCCAAGAAGCTATGGTAGGGCAAAGGTACTCGTTGGTCATGGCCTCGACCATGACCTTGAGCGCCTAGGGTTAGAGTA
CCCGGCATTCATGATCAGGTGAGGAGCAGGAAAAAAAAACGCAGTTAATTACCAGTTACCACAGTGGTTTTGCCTTTTTGACAG
AAATTGTTGTGCATATGCAGGGATACTGCAAAATACCCACCACTAATGAAGACTAGCAAGCTGAGTAACTCCCTCAAGTACCTTA
CACAAGCATACCTCGGGTATGTCAACTTCTTGGGTGGTCTATATATACAATCAGAACCATCATCGTACTGTTATCTAATATATGTG
AAATAATGCTGACGAGATTCTGTCTTCTTGTAGGTATGACATCCATACTGGCATTCAGGACCCCTACGAGGACTGCGTCGCAAC
AATGAGGCTGTACATCAGGATGAGATCACAGGCTCACCAGAGAGATTACAACTCCGGCTCTGGCGAGGCCCAGAACAACTATC
CAGCCTGGAGGCAGAGGGAGCTCGACAGGATGAGCCCAGAAGAACTCCTGGCACTTTCAGCATCAGACTACTACTGCTGGTG
CCTGGATTACTAAACCGATCGGCTTATAAGGAAAATAAGGCAGGCGAACGTTGTCGGTTGACATGTTCCGTCTATGGCGATCAT
CTTTAGATGTACAAGTAGCTTGCGGCTTTGCTATATTGGGGGTTAATTAAAGCGTATAAACAAAGGATTCTATATAAATGTATTGA
TGCCTTAGATCTGTATAAGAAGCAATATCATGATTTATGATGCATGTGGAAAGAGGATTTTCCTGCT
SEQIDNO: 186
MDSSSDAHGRHRCAACFRQFNKMEHLVEHMRAARHSGHEPRCDICRKHCRSFEALRDHLGVGGSTLPKAASCADAFAARGCAICL
RVLAGAGAASLGAHRAACRLSRTPPPRALQQHHRTQPQGGALALGCKMVGAGSDGSLDVCARVCVIDEQENVLFEAFVRPLLPVTH
YRYETTGIRPEHLRDGASVTVKSAQRRVEELLLDGEQPWRARTSRGRARLLVGHGLDHDLHALHMDYPAYLKRDTATYPPLMKTSK
LSNSLRFLTLNYLGYEIQTGHQHPFEDCVAAMRLYRRMRGQQHHPRADAHAPAPAADDQQPFPSWRQRELERMTPEDLLRLSTPD
YHCWCLDA
SEQIDNO: 187
ATCGGTCGACCAGATCAACCGAGCAGTTGGGGTGAACGAACCGTGGATCGACGTCGTACTCGTACGTACGTACGTACTGTACG
TGACGATGGATAGCTCCTCGGACGCTCACGGGCGTCACAGGTGCGCGGCGTGCTTCCGGCAGTTCAACAAGATGGAGCACCT
GGTGGAGCACATGCGGGCGGCGCGGCACTCGGGGCACGAGCCCCGCTGCGACATCTGCCGCAAGCACTGCCGCTCCTTCGA
GGCGCTCAGGGACCACCTCGGCGTCGGCGGCTCCACGCTGCCCAAGGCCGCCAGCTGCGCCGACGCCTTCGCCGCGCGGG
GCTGCGCCATCTGCCTCCGCGTCCTCGCCGGCGCCGGCGCCGCGTCGCTCGGAGCCCACCGCGCGGCGTGCCGGCTCTCG
CGCACCCCGCCGCCGAGGGCGCTGCAGCAGCATCACCGGACGCAGCCGCAAGGAGGCGCGCTCGCGCTGGGCTGCAAGAT
GGTCGGCGCCGGCAGCGACGGATCCCTGGACGTGTGCGCGCGGGTGTGCGTCATCGACGAGCAGGAGAACGTCCTGTTCGA
GGCCTTCGTGAGGCCGCTCCTTCCCGTGACGCACTACCGGTACGAGACGACGGGGATCCGGCCGGAGCACCTCCGCGACGG
CGCGAGCGTGACGGTGAAGAGCGCGCAGCGCCGGGTGGAGGAGCTGCTGCTCGACGGCGAGCAGCCGTGGAGGGCGCGCA
CCAGCCGGGGCAGGGCGCGCCTGCTGGTCGGCCACGGCCTCGACCACGACCTCCACGCGCTGCACATGGACTACCCGGCCT
ACCTCAAGCGCGACACGGCCACGTACCCGCCGCTCATGAAGACCAGCAAGCTCAGCAACTCGCTCCGCTTCCTCACGCTCAA
CTACCTCGGCTACGAGATCCAGACGGGGCACCAGCACCCCTTCGAGGACTGCGTCGCCGCCATGCGCCTCTACCGCAGGATG
CGCGGGCAGCAGCACCACCCCAGGGCCGACGCACACGCACCGGCGCCGGCCGCGGACGACCAGCAGCCGTTCCCGTCGTG
GAGGCAGCGGGAGCTGGAGCGCATGACGCCCGAGGACCTCCTCCGGCTCTCCACGCCGGACTACCACTGCTGGTGCCTOGA
TGCGTAGCGTGTGGCTTGAGCATCTATCTCCGTCAGAGGCTCAGAGCCAGCCCGAGCGCATCCTGATCGCGTTCCCGCCCCAT
GACCAATGACGTGGTCGTGTATAAGATTCTGCACCGTTCAGCCGTTCGTCAGCTCCTCCGGCTCACACGAACTTCTGTACCAAG
TATCTAATCTATCCATAGCTACTCCAAAAGTACAATCCGATCCACCCGTATGATTGAGGGAGAGGGACAGAGAATGTACCTGTG
GATCCGTTCGATATAAAACGCCTGTTAGAGTATATA
SEQIDNO: 188
ATCGGTCGACCAGATCAACCGAGCAGTTGGGGTGAACGAACCGTGGATCGACGTCGTACTCGTACGTACGTACGTACTGTACG
TGACGATGGATAGCTCCTCGGACGCTCACGGGTGAGCTTTCTTTCACAAACTATATGCATGCTTTGAGGTAAACTCTACCGTGC
TTCGGACACCTGGGTTTTGTTTTGTGGACCATTTCGATCACTAAAATCTAGCTCCATGCATCTGTGTCTGTTCGAAGTCGTTTTTT
CTTGTTTCAATGGCAATGCCTACTATGATTTTACTAGAACCATTGTGGACATTATTATOTTCACTCCTAACAGCGCCCTGCCAAG
GACATATGCTACTGCTACTCTACCAGTCAAAGGCACTTTTTTCTATGGCCGGCCTGGCTGTGAAATCTATGGCCGGTCATTTTTT
CTTCTTCGTGTTAGAACAAAATCCAAATAGACTTGTATTTAAAGACCAGCACTTTGAACTTGTGTTAGGAATCTTGTATAAAAAAA
AGAAAAGTAAAAATACGAGCGGCTCCCCGTCTACTCGTAACGTACAGTGTAACGAGGAATGACTTGTTTGGCAGGCGTCACAG
GTGCGCGGCGTGCTTCCGGCAGTTCAACAAGATGGAGCACCTGGTGGAGCACATGCGGGCGGCGCGGCACTCGGGGCACGA
GCCCCGCTGCGACATCTGCCGCAAGCACTGCCGCTCCTTCGAGGCGCTCAGGGACCACCTCGGCGTCGGCGGCTCCACGCT
GCCCAAGGCCGCCAGCTGCGCCGACGCCTTCGCCGCGCGGGGCTGCGCCATCTGCCTCCGCGTCCTCGCCGGCGCCGGCG
CCGCGTCGCTCGGAGCCCACCGCGCGGCGTGCCGGCTCTCGCGCACCCCGCCGCCGAGGGCGCTGCAGCAGCATCACCGG
ACGCAGCCGCAAGGAGGCGCGCTCGCGCTGGGCTGCAAGATGGTCGGCGCCGGCAGCGACGGATCCCTGGACGTGTGCGC
GCGGGTGTGCGTCATCGACGAGCAGGAGAACGTCCTGTTCGAGGCCTTCGTGAGGCCGCTCCTTCCCGTGACGCACTACCGG
TACGAGACGACGGGGATCCGGCCGGAGCACCTCCGCGACGGCGCGAGCGTGACGGTGAAGAGCGCGCAGCGCCGGGTGGA
GGAGCTGCTGCTCGACGGCGAGCAGCCGTGGAGGGCGCGCACCAGCCGGGGCAGGGCGCGCCTGCTGGTCGGCCACGGC
CTCGACCACGACCTCCACGCGCTGCACATGGACTACCCGGCCTACCTCAAGCGCGACACGGCCACGTACCCGCCGCTCATGA
AGACCAGCAAGCTCAGCAACTCGCTCCGCTTCCTCACGCTCAACTACCTCGGCTACGAGATCCAGACGGGGCACCAGCACCC
CTTCGAGGACTGCGTCGCCGCCATGCGCCTCTACCGCAGGATGCGCGGGCAGCAGCACCACCCCAGGGCCGACGCACACGC
ACCGGCGCCGGCCGCGGACGACCAGCAGCCGTTCCCGTCGTGGAGGCAGCGGGAGCTGGAGCGCATGACGCCCGAGGACC
TCCTCCGGCTCTCCACGCCGGACTACCACTGCTGGTGCCTCGATGCGTAGCGTGTGGCTTGAGCATCTATCTCCGTCAGAGGC
TCAGAGCCAGCCCGAGCGCATCCTGATCGCGTTCCCGCCCCATGACCAATGACGTGGTCGTGTATAAGATTCTGCACCGTTCA
GCCGTTCGTCAGCTCCTCCGGCTCACACGAACTTCTGTACCAAGTATCTAATCTATCCATAGCTACTCCAAAAGTACAATCCGAT
CCACCCGTATGATTGAGGGAGAGGGACAGAGAATGTACCTGTGGATCCGTTCGATATAAAACGCCTGTTAGAGTATATA
SEQIDNO: 189
MDSRRETSETLRNKCAACFRQYNKMEHLVEHMKVSYHSVHEPRCGACGKHCRSFESLREHLIGPLPKVECARVFAARGCGICLNIF
DSPATVRYHRPACQYSRAAPMPKAGSARGRAVAMACKMVGGGSDGSLDLCARLCIIGEDETVIFQTYVKPTAPVTNYRYEVTGIRPE
YLRDAMPLKLAQRRVQDILCNGEPLWKIRPRSYGRARVLVGHGVDQDLERLGLEYPAFMIRDTAKYPPLMKTSKLSNPLKYLTQAYL
GYDVHTGVQDPYEDCVAAMRLYIRMRSQAHPRDYASGSGEVQNNYPAWRQRELERMSPEELLALSGSDYYCWCLDP
SEQIDNO: 190
CGCGGTTTCAGAGTTCAGAGAGCTTGATCGATCGATCTATCCATAGGAATTTCAGGAGCGATGGACAGCAGGAGGGAGACCTC
GGAGACCTTGAGGAACAAGTGTGCGGCGTGCTTCAGGCAGTACAACAAGATGGAACATCTGGTGGAGCACATGAAGGTGTCG
TATCACTCCGTCCACGAGCCCAGGTGCGGCGCCTGCGGGAAGCACTGCCGCTCCTTCGAGTCCCTCAGGGAGCACCTCATCG
GGCCTTTGCCCAAGGTGGAGTGCGCGCGCGTCTTCGCCGCCCGGGGCTGCGGCATCTGCCTCAACATCTTCGACAGCCCGG
CCACCGTCAGATATCACCGCCCCGCCTGCCAGTACTCCCGTGCGGCTCCGATGCCTAAGGCTGGCTCAGCACGAGGACGCGC
GGTCGCCATGGCCTGCAAGATGGTCGGAGGAGGAAGCGACGGCTCGCTGGACCTCTGCGCTAGACTGTGCATCATTGGGGAA
GACGAGACCGTCATCTTCCAGACCTACGTGAAACCCACGGCGCCTGTCACCAACTACAGGTATGAGGTGACTGGAATAAGGCC
GGAGTACCTGAGGGACGCAATGCCACTGAAGCTTGCCCAGAGGAGGGTCCAGGACATCCTGTGCAACGGGGAGCCGCTGTG
GAAGATCCGGCCGAGGAGCTATGGAAGGGCAAGGGTCCTCGTTGGACATGGCGTGGACCAGGACCTTGAGCGCCTAGGGTT
GGAGTACCCAGCATTCATGATCAGGGACACTGCAAAGTATCCACCACTGATGAAAACCAGCAAGCTGAGCAATCCCCTAAAGTA
CCTTACACAAGCATATCTTGGGTATGATGTGCACACTGGCGTTCAGGATCCGTACGAGGACTGCGTGGCAGCGATGAGACTAT
ATATCAGGATGAGATCGCAAGCTCACCCGAGAGACTATGCCTCCGGTTCAGGGGAGGTGCAGAATAACTACCCGGCCTGGAG
GCAGAGGGAGCTGGAGAGGATGAGCCCAGAAGAACTGCTGGCACTTTCAGGATCAGATTACTACTGCTGGTGCCTGGACCCC
TAAACTGATGAGCTGAAGAGAACAAGGCAGGACCAATGGTGCTGGTTTTCTCATATTCCATCCATAATAATAATGATTACGTGTG
TCTAATTATCTTTGGACTTATGTATGGTGGGATTGAGTATCATATCGGTGATCTAGAGTTGTATGAGTCTTTATTTAATAGCAACC
ATATATAGCAAGAGGATTTCTACTTTCCTTTATGCATATTGAAAACCACAAAATCAGTAGTTAGCCAAAAAAATGACAAAATCAGT
GCAACAATTATACAACACACGGGCAAATAATCAGGCCTATAACATCATATTTAATGAGTTTACACTCTGTAGTCTGTACATGTTGT
GAGACTATGTCAGTACTAAGGATACATTATGCAGCAGAATATCGTACCTGTGCAAATCAGCGATAATCGAGTGTGTGCACAACT
GTCGAAAT
SEQIDNO: 191
CGCGGTTTCAGAGTTCAGAGAGCTTGATCGATCGATCTATCCATAGGAATTTCAGGAGCGATGGACAGCAGGAGGGAGACCTC
GGAGACCTTGAGGTAAGCATGCGCAAAGCTGATAAGAAATGACTGTCATTCTTGTATTGTGCTAATTTTGTGTGTCCCATGATAA
AGAGAGATCTACTCATTAATCTAGCTTGTAAACCTTGAAACTCAAACCTAATACTCCGTATGAGATTTCTTTATTTTTTCCCTTCCA
AACTAGCTGTCTCCGAGCTAGCTACACAAGGCTACATTTTTTTTTAATCTCTGCGAAGTGCTAAATAAACGGCCAGAACTGGCAC
CCATTTCTACTGCATTTGACCGATCGATGCTTGCCTTGTCCTGTAATTACATGTTAAATATCCTAATACGTGTGTGTGTGCATGTG
TCCCCATGGATGGATATATCAGGAACAAGTGTGCGGCGTGCTTCAGGCAGTACAACAAGATGGAACATCTGGTGGAGCACATG
AAGGTGTCGTATCACTCCGTCCACGAGCCCAGGTGCGGCGCCTGCGGGAAGCACTGCCGCTCCTTCGAGTCCCTCAGGGAGC
ACCTCATCGGTAAGCAAACAATTATCCACAAATGGATTAAGATTTTGTTAGACACATACTGCAAATTCTGATCTGTGCGTGTCTTG
ATGAATGAAGGGCCTTTGCCCAAGGTGGAGTGCGCGCGCGTCTTCGCCGCCCGGGGCTGCGGCATCTGCCTCAACATCTTCG
ACAGCCCGGCCACCGTCAGATATCACCGCCCCGCCTGCCAGTACTCCCGTGCGGCTCCGGTAATGCCTCCGTCGTTGTCGTC
CATGAACTCTATATATTCAGTTTGCACGGAGGCTGATGCTTCTTTTCCTCCCCCTCTATTCTGTCAGATGCCTAAGGCTGGCTCA
GCACGAGGACGCGCGGTCGCCATGGCCTGCAAGATGGTCGGAGGAGGAAGCGACGGCTCGCTGGACCTCTGCGCTAGACTG
TGCATCATTGGGGAAGACGAGACCGTCATCTTCCAGACCTACGTGAAACCCACGGCGCCTGTCACCAACTACAGGTATAGCCT
GATCGACATTGCCCTGGAATCCATCACTGGTTCTGCTTAATGGGCTGTTTGCTGAAATGATTTTCCTCGGTTCAGGTATGAGGT
GACTGGAATAAGGCCGGAGTACCTGAGGGACGCAATGCCACTGAAGCTTGCCCAGAGGAGGGTCCAGGACATCCTGTGCAAC
GGGGAGCCGCTGTGGAAGATCCGGCCGAGGAGCTATGGAAGGGCAAGGGTCCTCGTTGGACATGGCGTGGACCAGGACCTT
GAGCGCCTAGGGTTGGAGTACCCAGCATTCATGATCAGGTGAGCACCACAGCACAATTTTTTTTTGCTATGGCCCTAATTAAGA
TGTACTGGTAGATCTTTGCCGCTTTGCTTAGTGAGTTATGGTTCAGGGCCTACAGTTTTTTTTTTCAATCTCTGGATATGCAGGG
ACACTGCAAAGTATCCACCACTGATGAAAACCAGCAAGCTGAGCAATCCCCTAAAGTACCTTACACAAGCATATCTTGGGTATG
TCACTCCCTACCCTGGGCTACACAATCTCTCTGCACCTTTGGTCATTTTCTTAATGCTGAAGAGATTGTCCGTCTATCCCATTTG
CAGGTATGATGTGCACACTGGCGTTCAGGATCCGTACGAGGACTGCGTGGCAGCGATGAGACTATATATCAGGATGAGATCGC
AAGCTCACCCGAGAGACTATGCCTCCGGTTCAGGGGAGGTGCAGAATAACTACCCGGCCTGGAGGCAGAGGGAGCTGGAGA
GGATGAGCCCAGAAGAACTGCTGGCACTTTCAGGATCAGATTACTACTGCTGGTGCCTGGACCCCTAAACTGATGAGCTGAAG
AGAACAAGGCAGGACCAATGGTGCTGGTTTTCTCATATTCCATCCATAATAATAATGATTACGTGTGTCTAATTATCTTTGGACTT
ATGTATGGTGGGATTGAGTATCATATCGGTGATCTAGAGTTGTATGAGTCTTTATTTAATAGCAACCATATATAGCAAGAGGATTT
CTACTTTCCTTTATGCATATTGAAAACCACAAAATCAGTAGTTAGCCAAAAAAATGACAAAATCAGTGCAACAATTATACAACACA
CGGGCAAATAATCAGGCCTATAACATCATATTTAATGAGTTTACACTCTGTAGTCTGTACATGTTGTGAGACTATGTCAGTACTAA
GGATACATTATGCAGCAGAATATCGTACCTGTGCAAATCAGCGATAATCGAGTGTGTGCACAACTGTCGAAAT
SEQIDNO: 192
GGTTTCAGAGTTCAGAGAGCTTGATCGATCGATCTATCCATAGGAATTTCAGGAGCGATGGACAGCAGGAGGGAGACCTCGGA
GACCTTGAGGAACAAGTGTGCGGCGTGCTTCAGGCAGTACAACAAGATGGAACATCTGGTGGAGCACATGAAGGTGTCGTATC
ACTCCGTCCACGAGCCCAGGTGCGGCGCCTGCGGGAAGCACTGCCGCTCCTTCGAGTCCCTCAGGGAGCACCTCATCGGGC
CTTTGCCCAAGGTGGAGTGCGCGCGCGTCTTCGCCGCCCGGGGCTGCGGCATCTGCCTCAACATCTTCGACAGCCCGGCCAC
CGTCAGATATCACCGCCCCGCCTGCCAGTACTCCCGTGCGGCTCCGATGCCTAAGGCTGGCTCAGCACGAGGACGCGCGGTC
GCCATGGCCTGCAAGATGGTCGGAGGAGGAAGCGACGGCTCGCTGGACCTCTGCGCTAGACTGTGCATCATTGGGGAAGACG
AGACCGTCATCTTCCAGACCTACGTGAAACCCACGGCGCCTGTCACCAACTACAGGTATGAGGTGACTGGAATAAGGCCGGAG
TACCTGAGGGACGCAATGCCACTGAAGCTTGCCCAGAGGAGGGTCCAGGACATCCTGTGCAACGGGGAGCCGCTGTGGAAGA
TCCGGCCGAGGAGCTATGGAAGGGCAAGGGTCCTCGTTGGACATGGCGTGGACCAGGACCTTGAGCGCCTAGGGTTGGAGT
ACCCAGCATTCATGATCAGGGACACTGCAAAGTATCCACCACTGATGAAAACCAGCAAGCTGAGCAATCCCCTAAAGTACCTTA
CACAAGCATATCTTGGGTATGATGTGCACACTGGCGTTCAGGATCCGTACGAGGACTGCGTGGCAGCGATGAGACTATATATC
AGGATGAGATCGCAAGCTCACCCGAGAGACTATGCCTCCGGTTCAGGGGAGGTGCAGAATAACTACCCGGCCTGGAGGCAGA
GGGAGCTGGAGAGGATGAGCCCAGAAGAACTGCTGGCACTTTCAGGATCAGATTACTACTGCTGGTGCCTGGACCCCTAAACT
GATGAGCTGAAGAGAACAAGGCAGGACCAATGGTGCTGGTTTTCTCATATTCCATCCATAATAATAATGATTACGTGTGTCTAAT
TATCTTTGGACTTATGTATGGTGGGATTGAGTATCATATCGGTGATCTAGA
SEQIDNO: 193
MDSRRESAETLRNKCSACFRQYNKMEHLVEHMKVSYHSVHEPKCGACRKHCRSFESLREHLIGPLPKAECARVFSARGCGICLNIF
DSPAAARYHRQACQYSRAAPMPKGGAGGRAVAMACKMVGGGSDGSVDLCARVCLIGEDENVIFQTYVKPTAPVTNYRYEVTGIRP
EYLRDAMPLKLVQRRIQDILCNGEPLWKIRPRSYGRARILVGHIVDHDLERLGLEYPAFMIRDTAKYPPLMKTSKLSNTLKYLTQAYLG
YDVHTGIQDPYEDCVAAMRLYIRMRSQAHPRDYASGSGEVQNNYPAWRQREMERMSPEELLALSGSDYYCWCLDP
SEQIDNO: 194
TTTTTCTCGTGAAGGTTCCATCTCTGATCTCTCAACGAGGCTGGCCTATAAATAGGCGTTCCCATACTGCTCATCCTCGCCAACC
TCGAGATCTGAGAGATCTTGATCGACCTGCAGGAAGAATCTGTGGAGCTCGATGGACAGCAGGAGGGAGTCCGCGGAGACCC
TGAGGAACAAGTGCTCGGCGTGCTTCCGGCAGTACAACAAGATGGAGCACCTTGTGGAGCACATGAAGGTGTCGTATCACTCG
GTCCACGAGCCCAAGTGCGGCGCCTGCAGGAAGCACTGCCGCTCCTTCGAGTCCCTCAGGGAGCACCTCATCGGTCCGCTGC
CCAAGGCGGAATGCGCGCGCGTCTTCAGCGCCCGGGGCTGCGGCATCTGCCTCAACATCTTCGATAGCCCTGCCGCCGCCAG
ATATCACCGTCAAGCCTGCCAGTACTCCCGCGCTGCTCCGATGCCAAAGGGTGGCGCAGGTGGGCGTGCGGTTGCCATGGCC
TGCAAGATGGTCGGAGGAGGGAGCGACGGCTCTGTGGACCTCTGCGCAAGAGTGTGCCTTATTGGAGAAGATGAGAACGTCA
TCTTCCAGACCTATGTAAAACCTACAGCTCCGGTCACAAACTACAGGTATGAGGTTACTGGGATAAGGCCCGAGTACCTGAGG
GATGCAATGCCACTGAAACTTGTGCAGAGGAGGATCCAGGACATCCTGTGCAACGGGGAGCCGCTGTGGAAGATACGGCCGA
GGAGCTATGGAAGGGCAAGGATCCTTGTTGGGCATATCGTGGACCATGACCTCGAGCGCCTAGGTTTGGAGTACCCAGCATTC
ATGATCAGGGACACCGCAAAGTACCCACCGCTGATGAAAACCAGCAAGCTGAGCAATACCCTGAAGTACCTCACACAAGCATA
TCTTGGGTATGATGTCCATACTGGCATTCAGGATCCATACGAGGACTGCGTCGCGGCGATGAGGCTATATATCAGGATGAGAT
CACAAGCTCACCCGAGAGACTACGCCTCCGGTTCAGGGGAGGTGCAGAATAACTACCCGGCCTGGAGGCAGAGGGAGATGGA
GAGGATGAGCCCAGAAGAACTCCTGGCACTTTCAGGATCAGACTACTACTGCTGGTGCCTGGACCCCTAGACTGATGATGAGC
TAAAGAGAACAAGGCAGGGCTGGCCGACTGATGTTGGTTTGGTCATATTCCATCCGTAGTAATACCGACTACGTATGTCTAATT
ATCTT
SEQIDNO: 195
TTTTTCTCGTGAAGGTTCCATCTCTGATCTCTCAACGAGGCTGGCCTATAAATAGGCGTTCCCATACTGCTCATCCTCGCCAACC
TCGAGATCTGAGAGATCTTGATCGACCTGCAGGAAGAATCTGTGGAGCTCGATGGACAGCAGGAGGGAGTCCGCGGAGACCC
TGAGGTAACAAAACGTTGAGAAACACCATTTTTTCTTGGCTAACTTCGTTGATAACCCCAGTTTAAGTCCACTTTCGATGCTTGC
CTAACTGAAGCATGTCTGTGTGTGTACCAGGAACAAGTGCTCGGCGTGCTTCCGGCAGTACAACAAGATGGAGCACCTTGTGG
AGCACATGAAGGTGTCGTATCACTCGGTCCACGAGCCCAAGTGCGGCGCCTGCAGGAAGCACTGCCGCTCCTTCGAGTCCCT
CAGGGAGCACCTCATCGGTAAGCTACCAAACACATATCGATCTCTAGCTGCAAACATCTCTAGCTATGGCATCAACAGCAGCTG
AACTGAACGCCGCTCCTTGTGATCTTGATCTTGGAAATGAAGGTCCGCTGCCCAAGGCGGAATGCGCGCGCGTCTTCAGCGCC
CGGGGCTGCGGCATCTGCCTCAACATCTTCGATAGCCCTGCCGCCGCCAGATATCACCGTCAAGCCTGCCAGTACTCCCGCG
CTGCTCCGGTAATTCATGTTCTCCATTCCGTTCAATCGCCACCATCGACCTCTTCTTAACATGCATGGATGCTAGAGCTCCCGG
CCAACTTTTCACAGAAATGTTGGCGAGAGAGCAGAAATCAGAATCTGATGTCTCTCTTCTCCCTCACTTCTTTTTTCTCAGATGC
CAAAGGGTGGCGCAGGTGGGCGTGCGGTTGCCATGGCCTGCAAGATGGTCGGAGGAGGGAGCGACGGCTCTGTGGACCTCT
GCGCAAGAGTGTGCCTTATTGGAGAAGATGAGAACGTCATCTTCCAGACCTATGTAAAACCTACAGCTCCGGTCACAAACTACA
GGTAGCTCACCTTGGAATCCATTACCAGTACTGCTTACTAGCTATACAAGGATCAACTAGATGGATTGTTTTCTGAAGTGCAAAA
GATGAAGCTGACCATTTGGCTCTTCAGGTATGAGGTTACTGGGATAAGGCCCGAGTACCTGAGGGATGCAATGCCACTGAAAC
TTGTGCAGAGGAGGATCCAGGACATCCTGTGCAACGGGGAGCCGCTGTGGAAGATACGGCCGAGGAGCTATGGAAGGGCAA
GGATCCTTGTTGGGCATATCGTGGACCATGACCTCGAGCGCCTAGGTTTGGAGTACCCAGCATTCATGATCAGGTACAGATCAT
TGCTCAGTGAGCTATAGTTTGTTCCTGCTATCTCTTCCTTAATTGCCTCGAAATTTTACTATTTTCTTAACATAATTTATCCATGGA
CGTGCAGGGACACCGCAAAGTACCCACCGCTGATGAAAACCAGCAAGCTGAGCAATACCCTGAAGTACCTCACACAAGCATAT
CTTGGGTATGTCACTTGATAACTGAGCTATAAAACAAACACTCTGAACCCTTTGGTCATTGCCTAATCCTCAAGGGATTGCCCTT
CTATCCGGTTGTAGGTATGATGTCCATACTGGCATTCAGGATCCATACGAGGACTGCGTCGCGGCGATGAGGCTATATATCAG
GATGAGATCACAAGCTCACCCGAGAGACTACGCCTCCGGTTCAGGGGAGGTGCAGAATAACTACCCGGCCTGGAGGCAGAGG
GAGATGGAGAGGATGAGCCCAGAAGAACTCCTGGCACTTTCAGGATCAGACTACTACTGCTGGTGCCTGGACCCCTAGACTGA
TGATGAGCTAAAGAGAACAAGGCAGGGCTGGCCGACTGATGTTGGTTTGGTCATATTCCATCCGTAGTAATACCGACTACGTAT
GTCTAATTATCTT
SEQIDNO: 196
TGTGGAGCGCGATGGACAGCAGAAGGGAGTCCGCGGAGACCCTGAGGTAACAAGACGTTGAGAAACGCCATTTTTCTTAACAA
ACTGCAATAGCTCGAAGGAAGGGTGAGATAGACGCTTGGCCTAACTGAAGCATGTCTGTGTGTGTACCAGGAACAAGTGCTCG
GCGTGCTTCCGGCAGTACAACAAGATGGAGCACCTTGTGGAGCACATGAAGGTGTCGTACCACTCGGTCCACGAGCCCAAGT
GCGGCGCCTGCAGGAAGCACTGCCGCTCCTTCGAGTCCCTCAGGGAGCACCTCATAGGTAAGCTACCAGCAAACTCCACGAC
CACCAAATCTCTAGCTGCATGCAAACATCTCTATAGCTATGGCATCAACAGCAGCTGAACTGTGCACGCTGGGCTCATGCATCT
TTTATATTCTCCCGTCCGATCTTTGAAGTATGTCCTGACAGTATATATGTCTTGTTGCCTCTTCATCTTGGCAATGAAGGTCCATT
GCCCAAGGCCGAATGCGCGCGCGTCTTCAGCGCCCGGGGCTGTGGCATCTGCCTCAACATCTTTGACAGCCCCGCCGCCGCC
AGATATCACCGTCACGCCTGCCAATACTCCCGCGCTGCTCCGGTAATTAGTGTTCTCCACTCCGTTCAGTCTCCGCCATGGAGC
TCTTCATAGCTTGGATGCTAGAGCTCCCGGCCAACTTTTTACAAAAATGTTGCTGGGAGAGCAGAAATCAGAACCTGATGTTTCT
CTTCTCCCTCTCTTTTGCGTTCTTTTTCTCAGATGCCAAAGGGTGGCGCAGGTGGACGCGCGGTTGCCATGGCCTGTAAGATG
GTCGGAGGAGGGAGCGACGGCTCCGTGGACCTCTGCGCAAGAGTGTGCCTTATTGGAGAAGATGAGAACGTCATCTTCCAGA
CCTATGTAAAACCTACAGCTCCGGTCACAAACTACAGGTAGCTCACCTTGGAATCCATTACCAGTACTGCTTACTAGCTATACAA
GGATCAACTAGATGGATTGTTTTCTGAAGTGCAAAAGATGAAGCTGACCATTTGGCTCTTCAGGTATGAGGTTACTGGGATAAG
GCCCGAGTACCTGAGGGATGCAATGCCACTGAAACTTGTGCAGAGGAGGATCCAGGACATCCTGTGCAACGGGGAGCCGCTG
TGGAAGATACGGCCGAGGAGCTATGGAAGGGCAAGGATCCTTGTTGGGCATATCGTGGACCATGACCTCGAGCGCCTAGGTT
TGGACTACCCAGCATTCATGATCAGGTACAGATCATTGCTCAGTGAGCTATTGTTCCTACCATATCTTCCTTAATTGCCTCGAAA
TTTTACTATTTTCTTAACACTATTTATCCATGGACATGCAGGGACACCGCAAAGTACCCACCGCTGATGAAAACCAGCAAGCTGA
GCAATACCCTGAAGTACCTCACACAAGCATATCTTGGGTATGTCACTTGATAACTGATCTATAAAACAAACTCTCTGAACCCTTT
GGTCATTGCCTAATGCTCAAGGGATTGCCCCTCTATCCCGTTATAGGTATGATGTCCATACTGGCATTCAGGATCCATACGAGG
ACTGCGTCGCGGCGATGAGACTATATATCAGGATGAGATCACAAGCTCACCCGAGAGACTACGCCTCCGGTTCAGGGGAGGT
GCAGAATAACTACCCGGCCTGGAGGCAGAGGGAGATGGAGAGGATGAGCCCAGAAGAGCTCCTGGCACTTTCAGGATCAGAC
TACTACTGCTGGTGCCTGGACCCCTAGA
SEQIDNO: 197
MDSRRENKCSACFRQYNKMEHLVEHMKVSYHSVHEPKCGACRKHCRSFESLREHLIGPLPKAECARVFSARGCGICLNIFDSPAAA
RYHRHACQYSRAAPMPKGGAGGRAVAMACKMVGGGSDGSVDLCARVCLIGEDENVIFQTYVKPTAPVTNYRYEVTGIRPEYLRDA
MPLKLVQRRIQDILCNGEPLWKIRPRSYGRARILVGHIVDHDLERLGLDYPAFMIRDTAKYPPLMKTSKLSNTLKYLTQAYLGYDVHTGI
QDPYEDCVAAMRLYIRMRSQAHPRDYASGSGEVQNNYPAWRQREMERMSPEELLALSGSDYYCWCLDP
SEQIDNO: 198
TGTGGAGCGCGATGGACAGCAGAAGGGAGAACAAGTGCTCGGCGTGCTTCCGGCAGTACAACAAGATGGAGCACCTTGTGGA
GCACATGAAGGTGTCGTACCACTCGGTCCACGAGCCCAAGTGCGGCGCCTGCAGGAAGCACTGCCGCTCCTTCGAGTCCCTC
AGGGAGCACCTCATAGGTCCATTGCCCAAGGCCGAATGCGCGCGCGTCTTCAGCGCCCGGGGCTGTGGCATCTGCCTCAACA
TCTTTGACAGCCCCGCCGCCGCCAGATATCACCGTCACGCCTGCCAATACTCCCGCGCTGCTCCGATGCCAAAGGGTGGCGC
AGGTGGACGCGCGGTTGCCATGGCCTGTAAGATGGTCGGAGGAGGGAGCGACGGCTCCGTGGACCTCTGCGCAAGAGTGTG
CCTTATTGGAGAAGATGAGAACGTCATCTTCCAGACCTATGTAAAACCTACAGCTCCGGTCACAAACTACAGGTATGAGGTTAC
TGGGATAAGGCCCGAGTACCTGAGGGATGCAATGCCACTGAAACTTGTGCAGAGGAGGATCCAGGACATCCTGTGCAACGGG
GAGCCGCTGTGGAAGATACGGCCGAGGAGCTATGGAAGGGCAAGGATCCTTGTTGGGCATATCGTGGACCATGACCTCGAGC
GCCTAGGTTTGGACTACCCAGCATTCATGATCAGGGACACCGCAAAGTACCCACCGCTGATGAAAACCAGCAAGCTGAGCAAT
ACCCTGAAGTACCTCACACAAGCATATCTTGGGTATGATGTCCATACTGGCATTCAGGATCCATACGAGGACTGCGTCGCGGC
GATGAGACTATATATCAGGATGAGATCACAAGCTCACCCGAGAGACTACGCCTCCGGTTCAGGGGAGGTGCAGAATAACTACC
CGGCCTGGAGGCAGAGGGAGATGGAGAGGATGAGCCCAGAAGAGCTCCTGGCACTTTCAGGATCAGACTACTACTGCTGGTG
CCTGGACCCCTAGA
SEQIDNO: 199
MLTSAPLWTVRSFVELSSTVRNKCAACYRQFNRMEHLVEHMRASHHSPHEPRCGVCGKHCRSLDALRDHLGFGASLPPKPACATA
FAAKGCPLCLAVFPSSSSLRAHGPTCHHSRAPVPSRGAMPRMPVGGVVALGCKMVGGGSDGTLDLCGRVCVIDENETIVFENFVRP
LLPVTHYRYETTGIRPEYLRDAPTVKMVQRQVEGILLNGEQPWKVRSSRGAARILVGHGLEHDLDALGMDYPAYLKRDTAEYPPLMK
TSARLMSNSLRFLTQSCLGYDIQTGHQHPYEDCVAAMRLYKRMRAMTHGPRKNGGEGDACAAVAFPARRQRELERMSPEELLSMS
KLDYHCWCLDD
SEQIDNO: 200
AGCCGGCTCAACTTATCCATTCATTAATCAAAGCGTTTGCTTCTGATCCCTTGATTTGGAAATCATAATTCCTTTGCATTTGGGGT
TTGAATTAGTCAACTGTTTCTATAATCCAATGCCTTTGCATTGTTTCTTCCTTTGGTTATGAACCGATGCTCACATCAGCTCCGTT
ATGGACCGTTAGATCCTTTGTTGAATTATCATCGACGGTCCGGAACAAGTGCGCGGCGTGCTACCGCCAGTTCAACAGGATGG
AGCACCTGGTGGAGCACATGCGCGCGTCGCACCACTCGCCGCACGAGCCGCGCTGCGGCGTCTGCGGGAAGCACTGCCGCT
CCCTCGACGCCCTCCGTGACCACCTCGGCTTCGGCGCCTCCCTGCCCCCGAAGCCCGCCTGCGCCACGGCCTTTGCTGCCAA
GGGCTGCCCGCTCTGCCTCGCCGTCTTCCCTAGCTCCAGCTCCCTCCGCGCCCACGGCCCAACCTGCCACCACTCCCGCGCT
CCGGTTCCCTCGAGGGGGGCTATGCCGAGAATGCCCGTCGGCGGCGTGGTGGCGCTGGGGTGCAAGATGGTGGGGGGCGG
GAGCGACGGGACGCTGGACCTGTGCGGGCGCGTCTGCGTCATCGACGAGAATGAGACCATCGTCTTCGAGAACTTTGTGAGG
CCGCTCCTCCCGGTGACGCACTACCGGTACGAGACCACGGGGATCCGCCCCGAGTACCTGCGGGACGCGCCGACGGTGAAG
ATGGTGCAGCGGCAGGTGGAGGGCATCCTCCTCAACGGCGAGCAGCCGTGGAAGGTCCGGTCCTCGCGCGGCGCGGCCAG
GATCCTCGTCGGCCACGGCCTGGAGCACGATCTCGACGCGCTGGGCATGGACTACCCGGCGTACCTGAAGCGGGACACGGC
GGAATATCCGCCGCTGATGAAGACGAGCGCCAGGCTGATGAGCAACTCGCTTCGGTTCCTCACACAAAGCTGCCTCGGCTAC
GACATCCAGACGGGCCACCAGCACCCCTACGAGGACTGCGTGGCGGCCATGCGGCTGTACAAGAGAATGCGCGCGATGACG
CACGGCCCGCGGAAGAACGGGGGCGAAGGCGATGCGTGCGCGGCGGTGGCATTCCCGGCGCGGAGGCAGCGGGAGCTGG
AGCGCATGTCGCCGGAGGAGCTCCTGAGCATGTCCAAGCTCGACTATCACTGCTGGTGCCTCGACGACTAGCCTCGACGACT
GCAGCTGCATCTGCATGTCCAACAGTCCAAGCATGAGCCATG
SEQIDNO: 201
ATGCTCACATCAGCTCCGTTATGGACCGTTAGATCCTTTGTTGAATTATCATCGACGGTGTCCTTCGTATACAAAAACCTCGAGA
AGTTCTTTCCCTAATACATAATGCCATTGGTAAATCATATTCTCTGATTTGGCCAACCATGCTCTGCTTTCGATAGTTTGGCCATG
TTTACAAAAAATATATCAACATCAACAACACCAAATTTTCATTAGACCCGCCGTAAAATATAAGAACAGAAGACACATTTTTTTTTC
AGTGAAGAAAACATATGATACTTTTAGCCTCATGACATGCCAAACTGAGCTTGAACAAGATCCGTCCAGTATGCCACGGTTGCG
CTCACCATGAACCTTCAGTTTCGTGAATCTATTCGACGTCGATTTGTAGTCACTGAAGATAGCAAACCAGATGCGCAGGGCCAG
GACCGTCCTTTGATCCCCGCCGAGAACGAGATGACAACGTCTCCAAAAGCAAAGCTAGCTCCGGAGGGTATGTTCCTAGGATA
TCCATGGTTGGATTCAGGGACCTGTGCAGCTCTCCGCCTCTCCTCCATCGCTAAAGCAAAGCCAATGATAGGATAATCTTTCCA
TGTGTTTGTTCTTGCCTTTTTGTTCAAACCGAATCTGTTGACCAGGGTATCTGATCTCTCCCCCCCTCTCTTTTCCTTTCTACATA
CAGCACCTGGTGTATCATGAGGGCGTTCTGGTGTCTATGTTCTTTTCTTTGCATGGGCTGGTGTCTATGTTCTTGATGCTCCAAG
AAAGATGAGGACATCTTGTGGCCTCTGTACTGTGCGCTGGTGAAGAAGGCAAGTCGCCATCAAGAATCGAATGCCATCGGTTTT
GCAGGCAGATAAATAGCCGTCCGTCCGTGTGCACAGATTCTTACAATCCATCCAACCAGTCTCAACCTCTGTTTGCTGCATACT
GCACAGCTTATTTGCTTAGGAAAGGTGACCGAGTGATCATGGATAGCTCTTCAGATGCCCACAGGTGCACTCACTGGCCACTAC
TCTGTTTTAGTTGTCTTGTTATCACACATTTTGCAGTCGAAGAACTCTGCTATACCTAAGCTGCAGTATGCTCAAAAGTTTTGTGA
GATCATGCCACCATAAATTCAGCACATTTTCTTTGTTTCTACATTACGTGACAAGTTGAGATTGATTCTTAAGAATTTTCTAATTAA
GCTGCTGCGTAGTGGACTGCATGATATAGAAAATGTAATAGATGATGTCGCTAAGATTGCACTGTGCGTTTTGTTGCCACAATG
CATGATCACTCAGGCAGAGACATACACCTATGAGTAGAGTAGTACCAGTGACGATGGATGATTCAATTCGTCGCGTGCATGCAG
CCGGAACAAGTGCGCGGCGTGCTACCGCCAGTTCAACAGGATGGAGCACCTGGTGGAGCACATGCGCGCGTCGCACCACTC
GCCGCACGAGCCGCGCTGCGGCGTCTGCGGGAAGCACTGCCGCTCCCTCGACGCCCTCCGTGACCACCTCGGCTTCGGCGC
CTCCCTGCCCCCGAAGCCCGCCTGCGCCACGGCCTTTGCTGCCAAGGGCTGCCCGCTCTGCCTCGCCGTCTTCCCTAGCTCC
AGCTCCCTCCGCGCCCACGGCCCAACCTGCCACCACTCCCGCGCTCCGGTTCCCTCGAGGGGGGCTATGCCGAGAATGCCC
GTCGGCGGCGTGGTGGCGCTGGGGTGCAAGATGGTGGGCGGCGGGAGCGACGGGACGCTGGACCTGTGCGGGCGCGTCTG
CGTCATCGACGAGAATGAGACCATCGTCTTCGAGAACTTTGTGAGGCCGCTCCTCCCGGTGACGCACTACCGGTACGAGACCA
CGGGGATCCGCCCCGAGTACCTGCGGGACGCGCCGACGGTGAAGATGGTGCAGCGGCAGGTGGAGGGCATCCTCCTCAACG
GCGAGCAGCCGTGGAAGGTCCGGTCCTCGCGCGGCGCGGCCAGGATCCTCGTCGGCCACGGCCTGGAGCACGATCTCGAC
GCGCTGGGCATGGACTACCCGGCGTACCTGAAGCGGGACACGGCGGAATATCCGCCGCTGATGAAGACGAGCGCCAGGCTG
ATGAGCAACTCGCTTCGGTTCCTCACACAAAGCTGCCTCGGCTACGACATCCAGACGGGCCACCAGCACCCCTACGAGGACTG
CGTGGCGGCCATGCGGCTGTACAAGAGAATGCGCGCGATGACGCACGGCCCGCGGAAGAACGGGGGCGAAGGCGATGCGT
GCGCGGCGGTGGCATTCCCGGCGCGGAGGCAGCGGGAGCTGGAGCGCATGTCGCCGGAGGAGCTCCTGAGCATGTCCAAG
CTCGACTATCACTGCTGGTGCCTCGACGACTAG
SEQIDNO: 202
MEHLVEHMRSSHHSHHEPRCGVCGKHCRSLDALRDHLGFGASLPSKPACAATFQAHGCPLCLAVFPTSAALRAHRPACKLSGAPH
PSSVQSLTRTMSRVGARGGRGAVALGCKMVGGGSDGTLDVCARVCVVDEHEAILYESFVKPLIPVTHYRYETTGIRPEHLRDAPTVK
QAMRRVQDILLNGEQSYYSSRGAARLLVGHGLEHDLDALGMDYPAHLRRDTAAYPPLMKTSARLMSNSLRYLTRSCLGYDIQTGGH
HHPYDDCVAAMRLYKRMRAMSHLHLHGRPKDDDDESAVKAFPAWRQRELERMSPEELLAMSKPDYRCWCLDDDRRC
SEQIDNO: 203
GGTAGCCGTCACAGTTGCGCGGCGTGCTACCGTCAGTTCAACCGGATGGAGCACCTGGTGGAGCACATGCGGTCGTCGCACC
ACTCCCACCACGAGCCCCGCTGCGGCGTCTGCGGCAAGCACTGCCGCTCCCTCGACGCCCTCCGCGACCACCTCGGCTTCG
GCGCCTCCCTGCCCTCCAAGCCCGCCTGCGCCGCCACCTTCCAAGCCCACGGCTGCCCGCTCTGCCTCGCCGTCTTCCCCAC
CTCCGCCGCCCTTCGCGCCCACCGCCCAGCATGCAAGCTCTCCGGCGCCCCCCATCCTTCCTCGGTGCAGAGCCTCACGAGG
ACTATGTCGAGGGTGGGCGCGCGAGGCGGCCGCGGCGCGGTGGCGCTGGGGTGCAAGATGGGGGGGGGGGGAGCGACG
GCACGCTGGACGTGTGCGCGCGCGTCTGCGTCGTCGACGAGCACGAGGCCATCCTCTACGAGAGCTTCGTGAAGCCCCTCAT
CCCGGTCACGCACTACCGGTACGAGACCACGGGCATCCGGCCCGAGCACCTGCGCGACGCGCCGACGGTGAAGCAGGCGAT
GAGGCGGGTCCAGGACATCCTCCTCAACGGCGAGCAATCTTATTACTCCTCCCGCGGCGCGGCCCGGCTCCTCGTCGGCCAC
GGGCTGGAGCACGACCTCGACGCGCTCGGCATGGACTACCCGGCGCACCTCAGGGGGGACACGGCCGCGTACCCGCCGCT
GATGAAGACGAGCGCCAGGCTCATGAGCAACTCGCTCCGGTATCTCACGCGGAGCTGCCTGGGCTATGACATACAGACCGGC
GGACACCATCACCCCTACGACGACTGCGTGGCCGCCATGCGCCTCTACAAGAGGATGCGCGCCATGAGTCACCTGCACCTGC
ACGGCCGGCCCAAGGACGACGATGATGAGTCCGCGGTCAAGGCCTTCCCGGCGTGGAGGCAGCGAGAGCTGGAGCGCATGT
CGCCGGAGGAGCTCCTGGCGATGTCCAAGCCCGACTACCGATGTTGGTGCCTCGACGACGACCGCCGATGCTGACGGCAGC
CTGCTCCCTACGGGATTCGAATCTTGGCTGGCGCTTTTACTTGGTGGAATGGTGGTGATGATGAAAAGATAAAGAGAAAATAAA
ATACCGCGTGCGTCGGATGGATAGTTGCCGTAGACGTGTGGTGGTCGAATAAATCACAGTTTTGCTTTGTGTGAGAAAAAAAAA
AAAAAACGA
SEQIDNO: 204
MDSRRESSETLRNKCAACYRQYNRMEHLVEHMKVSFHSAHEPRCGVCAKHCRSLESLREHLIGPLPKVECARVFAARGCSICLNLF
DSAAAVRYHRASTCQFTRAAPMPRGSYGGRAVAMACKMVGGGSDGSLDICARVCLIGEDENVIFQTYVKPTTTVTNYRYEMTGIRP
EYLRDAMPLKLVQRRIQDILCNGEPLWKIRPRSSGRARILVGHGLEHELERLGLEYPAFMIRDTAKYPPLMKTSKLSNSLKYLTQAYLG
YDIHTGIQDPYEDCVAAMRLYIRMRSQAHPRDYASGSGETQNNYPAWRQRELERMSPEELLALSGSDYYCWCLDF
SEQIDNO: 205
ATGGACAGCAGGAGGGAGTCCTCGGAGACCCTGAGGAACAAATGCGCGGCGTGCTACAGGCAGTACAACCGGATGGAGCAC
CTGGTGGAGCACATGAAGGTGTCGTTCCACTCCGCCCACGAGCCCCGCTGCGGCGTCTGCGCCAAGCACTGCCGCTCCCTCG
AGTCCCTCCGCGAGCACCTCATCGGGCCGTTGCCCAAGGTGGAGTGCGCGCGCGTGTTCGCGGCCCGCGGCTGCAGCATCT
GCCTCAACCTCTTCGACAGCGCCGCCGCCGTCAGATACCACCGCGCCTCCACCTGCCAGTTCACCCGCGCCGCCCCGATGCC
CAGGGGTAGCTACGGAGGCCGTGCGGTGGCCATGGCGTGTAAGATGGTCGGAGGAGGAAGCGATGGCTCGCTCGACATCTG
CGCGAGGGTGTGCCTGATCGGAGAGGACGAGAACGTCATCTTCCAGACCTATGTGAAACCCACCACGACCGTCACAAACTACA
GGTATGAAATGACTGGGATAAGGCCGGAGTACTTGAGGGACGCAATGCCACTGAAGCTTGTGCAGAGGAGGATCCAGGACAT
CCTGTGCAACGGTGAGCCACTATGGAAGATACGGCCAAGGAGCTCTGGGAGGGCAAGGATCCTCGTTGGCCATGGCCTGGAG
CATGAACTTGAGCGCCTGGGACTGGAGTACCCGGCATTCATGATCAGGGATACTGCAAAGTACCCACCACTGATGAAAACTAG
CAAGCTGAGCAACTCCCTAAAGTACCTTACACAGGCATATCTTGGGTATGATATCCACACTGGCATTCAGGATCCCTATGAAGA
TTGCGTGGCAGCGATGAGGCTGTACATTAGGATGAGATCGCAAGCCCACCCGAGAGACTACGCCTCCGGTTCAGGTGAGACG
CAGAACAACTACCCAGCCTGGAGGCAGAGGGAGCTAGAGAGGATGAGCCCAGAAGAACTCCTGGCACTCTCGGGTTCAGATT
ACTACTGTTGGTGCCTGGATTTCTGA
SEQIDNO: 206
ATTACGATAAACTGCAGGCTTATTCCTCAGAATGCATGCAGCAGTGACGACAAGACGGTGATTCCCAGGGGTCATTCCTTCTTC
CTCGTGAAGGTTCTTCCATCCTTTCAACGTTTGTTGCCTCTATAAATAGCCTCTCCATGTTGCCTACCGTCCTCACCAACCTAGC
TAACTAGCGCCCCTCGAGGTTTCAGGGAGACAACTGATCGATCAGAAACCTTGGTCGACCGATCAGTAAGAGCAACTAGAGAC
AGAAACCTTAATTCTCGATCAGCAGGAGTTGTAGTAGTGCTATATATGATGGACAGCAGGAGGGAGTCCTCGGAGACCCTGAG
GTAAGATGGTCACAAACTGAATGCCATTACTACAGTAGTATTGCAAGATGAGCTGAGCATGCAAGACTGGTGTGTGATGAACTA
GCTAATTAATCAAGCTTTAATCATGCATGGTAGTACGTTCTTCTCGTGCTCTAAACATCGAGCTAGATATATAGGACCCTTTTTTT
TCTTGTCCTAGCTAGTTCCATTCAATACCTTGAATATGCATGTATATATGATACTACATATTCTGCGCACGAATGAATGAGTACCT
TTTCAACTTTCTTATCCCCTATTGCCGGTGCAAAGAATCAGAATTTCATAAATGCGTGCATAGTGCCTCGCTCGCGATATTCTAAA
GACGCGATCGAACTCAATCGATGAATGAAAATGATGATCTCGCAGGAACAAATGCGCGGCGTGCTACAGGCAGTACAACCGGA
TGGAGCACCTGGTGGAGCACATGAAGGTGTCGTTCCACTCCGCCCACGAGCCCCGCTGCGGCGTCTGCGCCAAGCACTGCC
GCTCCCTCGAGTCCCTCCGCGAGCACCTCATCGGTGAGTACACAAGTAGCCGTTTTTAATTTGCTCGGTTGATGCAACGAGCTA
GTTTTTGTGGAGTTTTCGCGTGGTATCTGACGGTTTCTCGCGTACGCCGTGCGCATGCAGGGCCGTTGCCCAAGGTGGAGTGC
GCGCGCGTGTTCGCGGCCCGCGGCTGCAGCATCTGCCTCAACCTCTTCGACAGCGCCGCCGCCGTCAGATACCACCGCGCCT
CCACCTGCCAGTTCACCCGCGCCGCCCCGGTATGTAATCCCCTCTCACCTCAGTTACACTGCGCATGCTAGTTTGCAAGGCTT
GTTGCTGAATTTGCCCGTGGTTTTCTTGCGTTTGCATGCAGATGCCCAGGGGTAGCTACGGAGGCCGTGCGGTGGCCATGGC
GTGTAAGATGGTCGGAGGAGGAAGCGATGGCTCGCTCGACATCTGCGCGAGGGTGTGCCTGATCGGAGAGGACGAGAACGT
CATCTTCCAGACCTATGTGAAACCCACCACGACCGTCACAAACTACAGGTAAAATATATAGGAGATGATCCATTATTTTATTACT
GATGATGTTTCTGAGTGTTAGCTAGTAGTACAATTTTTAGCTGTCATTGTTCGCATGTGTAGATCTATCGGACCAGAAAAGCAGA
AAAGACATAATGGAAAACCGAGCAATAAACATACTGCTATAGAAACTAGCAGTAGAAATTAAAGGCATAGATCGATGGATAGTTT
TATGAGATGATGAATGAGGGGATGATTTATGATGTTTCTGTTCAGGTATGAAATGACTGGGATAAGGCCGGAGTACTTGAGGGA
CGCAATGCCACTGAAGCTTGTGCAGAGGAGGATCCAGGACATCCTGTGCAACGGTGAGCCACTATGGAAGATACGGCCAAGG
AGCTCTGGGAGGGCAAGGATCCTCGTTGGCCATGGCCTGGAGCATGAACTTGAGCGCCTGGGACTGGAGTACCCGGCATTCA
TGATCAGGTCAGCAGCACAAGGCAAATTAATTTGCTGCAAATTAGACCTTGCCAGTTTCTCCCTTGCTGACACAATTTATCTCTG
CATTTTTTTCAGGGATACTGCAAAGTACCCACCACTGATGAAAACTAGCAAGCTGAGCAACTCCCTAAAGTACCTTACACAGGCA
TATCTTGGGTATGCAAACTTGCTAAGTCAGCTGTACAATCTCTATAGACTCTTAGACTTTGCATTATTAATGTTGAAGATACTATC
CTTGAATCCCTATTGCAGGTATGATATCCACACTGGCATTCAGGATCCCTATGAAGATTGCGTGGCAGCGATGAGGCTGTACAT
TAGGATGAGATCGCAAGCCCACCCGAGAGACTACGCCTCCGGTTCAGGTGAGACGCAGAACAACTACCCAGCCTGGAGGCAG
AGGGAGCTAGAGAGGATGAGCCCAGAAGAACTCCTGGCACTCTCGGGTTCAGATTACTACTGTTGGTGCCTGGATTTCTGAAG
GCTGAACTGATCGGTTGAAGAGAATAAGGAAGAGCCAACATTGATGGTTTATTCATGTTTCGTCCAAATCTCTATATATTTATAAG
TATATCTTGGGACTTGATTATAGTGGAATTGACTATAATGTATAAAGTTATCCTATGTAATGCTATCATATAATATTGGTGAGTTAG
AGTTGTATGGAGTGATGTTAAACAG
SEQIDNO: 207
MDNSSDSQRRKRCAACYREFNKKEHLVEHMRTSLHSAHDPRCGVCGKHCRSLDALRDHLTGALPKPECAAAFASRGCPLCLHVVL
PPTAAAHSCPAAAPPLGGVLALGCKMVGAGSDGSLDVCARVCVVDEQERVVLDTFVKPHIPVTHYRYDTTGIRPEHLRDAMTPKQA
ARRVQELLLNGEPAWKARSSRGRARILVGHGLDHDLESLGMDYPEYLKRDTARYPALMKTSNSRLSNSLKYLTLAYLGYHIQIAGRH
HHPYDDCVAALRLYRRMRGARPHTCRDAGVGPHAPPPTPAEAFPAWRQRELERMSPEELLQLSTSDYYCWCLDATD
SEQIDNO: 208
ATGGATAATTCTTCAGATTCTCAGAGGAGGAAGAGGTGCGCGGCGTGCTATAGGGAGTTCAACAAGAAGGAGCACCTGGTGGA
GCACATGCGGACGTCGCTGCATTCGGCGCACGACCCTCGCTGCGGCGTCTGCGGCAAGCACTGCCGCTCCCTCGACGCCCT
CCGCGACCACCTCACCGGCGCCCTCCCCAAGCCGGAGTGCGCCGCCGCCTTCGCCTCCCGCGGCTGCCCCCTCTGCCTCCA
CGTAGTCCTCCCGCCCACCGCCGCCGCCCACTCCTGCCCCGCGGCCGCGCCACCGCTCGGCGGCGTCCTCGCCCTGGGGTG
CAAGATGGTGGGCGCCGGCAGCGACGGGTCCCTGGACGTGTGCGCCCGCGTGTGCGTGGTGGACGAGCAGGAGCGCGTGG
TGTTGGACACCTTCGTCAAGCCGCACATCCCCGTCACGCACTACCGCTACGACACCACCGGCATCCGCCCCGAGCACCTGCG
CGACGCCATGACGCCCAAGCAGGCGGCGCGCCGGGTGCAGGAGCTGCTGCTCAACGGCGAGCCGGCGTGGAAGGCGCGGA
GCAGCCGCGGGAGGGCCCGGATCCTGGTCGGCCACGGCCTGGACCACGACCTCGAGTCGCTGGGCATGGACTACCCGGAGT
ACCTGAAGCGGGACACGGCGAGGTACCCGGCGCTGATGAAGACGAGCAACAGCCGCCTCAGCAACTCGCTCAAGTACCTCAC
CCTCGCCTACCTCGGCTACCACATCCAGATCGCCGGCCGCCACCACCACCCCTACGACGACTGCGTCGCCGCGCTGCGCCTC
TACCGCCGGATGCGTGGCGCGCGGCCGCACACCTGCAGGGACGCCGGCGTGGGGCCGCACGCGCCGCCGCCAACGCCGG
CGGAGGCGTTCCCGGCGTGGAGGCAGCGGGAGCTGGAGCGCATGTCGCCGGAGGAGCTCCTCCAGCTGTCCACCTCGGACT
ACTACTGCTGGTGCCTCGACGCCACCGACTAA
SEQIDNO: 209
TTCTACTCCATCGGTTCGAAAATATAAACCATTTTGAAGAAATGTGACACATTATATACTATGAATCTGGATACGGAGCCTGTCCA
GATTCGTAGTAGAGGATATGTCAAAAACGGAGGGAGTATCTAGCAGGGACATCACATTCGATCGACAACACTGTCAAGAATCAA
ATTCTGTCCGTTGGATTTGCGTATAAATAGGCATCGGAAACAAGTGCAGATAGCAATCACCAATCAGCACAACAACTAACTACAC
CAGTGGCCACTCACCTGCACTCCTGCAGTAGTCTTCAGATCGAGAATGGATAATTCTTCAGATTCTCAGAGGTATTAGCCAATG
TTCTAACTACATTCTGATTATATATATATATATATATATGAAGAAAAGAAAGAAAGAAAGAAAGAAAGAAATTGATTAAGTTAAATA
AAAAATATGAATAGGAGGAAGAGGTGCGCGGCGTGCTATAGGGAGTTCAACAAGAAGGAGCACCTGGTGGAGCACATGCGGA
CGTCGCTGCATTCGGCGCACGACCCTCGCTGCGGCGTCTGCGGCAAGCACTGCCGCTCCCTCGACGCCCTCCGCGACCACCT
CACCGGCGCCCTCCCCAAGCCGGAGTGCGCCGCCGCCTTCGCCTCCCGCGGCTGCCCCCTCTGCCTCCACGTAGTCCTCCC
GCCCACCGCCGCCGCCCACTCCTGCCCCGCGGCCGCGCCACCGCTCGGCGGCGTCCTCGCCCTGGGGTGCAAGATGGTGG
GCGCCGGCAGCGACGGGTCCCTGGACGTGTGCGCCCGCGTGTGCGTGGTGGACGAGCAGGAGCGCGTGGTGTTGGACACC
TTCGTCAAGCCGCACATCCCCGTCACGCACTACCGCTACGACACCACCGGCATCCGCCCCGAGCACCTGCGCGACGCCATGA
CGCCCAAGCAGGCGGCGCGCCGGGTGCAGGAGCTGCTGCTCAACGGCGAGCCGGCGTGGAAGGCGCGGAGCAGCCGCGG
GAGGGCCCGGATCCTGGTCGGCCACGGCCTGGACCACGACCTCGAGTCGCTGGGCATGGACTACCCGGAGTACCTGAAGCG
GGACACGGCGAGGTACCCGGCGCTGATGAAGACGAGCAACAGCCGCCTCAGCAACTCGCTCAAGTACCTCACCCTCGCCTAC
CTCGGCTACCACATCCAGATCGCCGGCCGCCACCACCACCCCTACGACGACTGCGTCGCCGCGCTGCGCCTCTACCGCCGGA
TGCGTGGCGCGCGGCCGCACACCTGCAGGGACGCCGGCGTGGGGCCGCACGCGCCGCCGCCAACGCCGGCGGAGGCGTT
CCCGGCGTGGAGGCAGCGGGAGCTGGAGCGCATGTCGCCGGAGGAGCTCCTCCAGCTGTCCACCTCGGACTACTACTGCTG
GTGCCTCGACGCCACCGACTAATAACGAATTATTACTCCCACGTACTACCTAAACTACTTACTCAGTATAATTATGACTAATTATG
CTGCTGCGTGTCCGTCTTTATTAGTACTCCACTCCGTATGTACGAATCAGGATGTAAGACCATCGATCTGATAGAGACAGTACC
GTCACAGTACGTGTGACAACCACAGGTTGCAAAATTTTTTAAAAAAGGTTTT
SEQIDNO: 210
TGCATGTGACATTTAGACCTTATCGGAATTAATTTGTAGAATTATTAATTAAGATGTTGATTAGTTCAAACAAAAATTTTATATTAAA
AAATGTAAACGAATATTTTGTATGTTCAGTGAAAGTAAAACAAATTAAATTAACAAGAAACTTATAGAAGAAAATTTTTACTATTTA
AGAGAAAGAAAAAAATCTATCATTTAATCTGAGTCCTAAAAACTGTTATACTTAACAGTTAACGCATGATTTGATGGAGGAGCCAT
AGATGCAATTCAATCAAACTGAAATTTCTGCAAGAATCTCAAACACGGAGATCTCAAAGTTTGAAAGAAAATTTATTTCTTCGACT
CAAAACAAACTTACGAAATTTAGGTAGAACTTATATACATTATATTGTAATTTTTTGTAACAAAATGTTTTTATTATTATTATAGAAT
TTTACTGGTTAAATTAAAAATGAATAGAAAAGGTGAATTAAGAGGAGAGAGGAGGTAAACATTTTCTTCTATTTTTTCATATTTTCA
GGATAAATTATTGTAAAAGTTTACAAGATTTCCATTTGACTAGTGTAAATGAGGAATATTCTCTAGTAAGATCATTATTTCATCTAC
TTCTTTTATCTTCTACCAGTAGAGGAATAAACAATATTTAGCTCCTTTGTAAATACAAATTAATTTTCCTTCTTGACATCATTCAATT
TTAATTTTACGTATAAAATAAAAGATCATACCTATTAGAACGATTAAGGAGAAATACAATTCGAATGAGAAGGATGTGCCGTTTGT
TATAATAAACAGCCACACGACGTAAACGTAAAATGACCACATGATGGGCCAATAGACATGGACCGACTACTAATAATAGTAAGTT
ACATTTTAGGATGGAATAAATATCATACCGACATCAGTTTTGAAAGAAAAGGGAAAAAAAGAAAAAATAAATAAAAGATATACTAC
CGACATGAGTTCCAAAAAGCAAAAAAAAAGATCAAGCCGACACAGACACGCGTAGAGAGCAAAATGACTTTGACGTCACACCAC
GAAAACAGACGCTTCATACGTGTCCCTTTATCTCTCTCAGTCTCTCTATAAACTTAGTGAGACCCTCCTCTGTTTTACTCACAAAT
ATGCAAACTAGAAAACAATCATCAGGAATAAAGGGTTTGATTACTTCT
SEQIDNO: 211
MECADNPRNKCAACYRQFNRMEHLADHMRTSFHSVHEPTCGVCKKHCRSFESLREHLIGPLPKQECRNVFNIRGCKFCLAILDSPY
ALRVHQDRCQLSGVSHGISAYMANLGLRDSLTIDNGYSRGPQVVALACKTVGGGSDRSLDLCARVCIIDENENIIFHTYVKPSIPVTNY
RYETTGIRPEHLRDAMPLRQVQRKVQDFLCNGEPTWKIRSPKGGKARILVGHGLDHDLDKMQVEYPPIMIRDTAKYPPLMKTSKLSN
SLKYLTQAYLGYDIQNGIQDPYEDCVATMRLYVRMRRQVHRRQDYPLASDPQNRNNFASWRQNELERMSPEEMLAISRSDYYCWC
LDSA
SEQIDNO: 212
TAATAATATATACTTCACCTATATTTCATCACTAAAACCAGCTATGGAGTGTGCAGATAACCCAAGGAACAAATGTGCAGCTTGCT
ATAGACAGTTCAATAGGATGGAACATTTGGTTGATCATATGAGAACTTCGTTTCATTCAGTTCATGAACCTACTTGTGGTGTTTGT
AAAAAGCACTGCCGATCCTTTGAATCTCTAAGGGAACATCTAATAGGTCCATTGCCCAAACAAGAATGCAGGAACGTGTTCAAC
ATCCGAGGCTGCAAGTTTTGTTTAGCCATTCTCGATAGCCCTTATGCTCTTAGGGTTCATCAAGACAGATGCCAGCTCTCTGGA
GTGAGCCATGGGATATCAGCTTACATGGCTAACTTGGGTCTTAGAGATAGCTTAACAATCGACAATGGTTATTCAAGAGGCCCA
CAAGTTGTTGCACTTGCATGCAAAACTGTTGGTGGTGGAAGCGATAGGTCATTGGATCTTTGTGCAAGGGTTTGCATCATTGAT
GAAAATGAGAATATAATCTTCCATACTTATGTTAAACCTTCTATTCCAGTTACAAACTATAGGTACGAAACAACAGGCATTCGACC
AGAACATTTGAGGGATGCAATGCCATTGAGACAAGTTCAAAGAAAGGTTCAAGATTTCCTTTGCAATGGAGAACCAACGTGGAA
AATTCGATCACCTAAAGGTGGAAAAGCTAGGATTCTTGTAGGGCATGGTCTTGATCATGACCTAGATAAAATGCAAGTCGAATAT
CCACCAATTATGATAAGGGATACTGCAAAATATCCTCCCTTGATGAAAACAAGCAAACTTAGCAACTCACTCAAGTACTTAACTC
AAGCATATTTGGGGTATGACATTCAAAATGGCATTCAAGATCCTTATGAGGATTGTGTTGCAACAATGAGGCTTTACGTTAGGAT
GAGGAGACAAGTTCATAGGAGACAAGACTATCCGTTGGCTTCCGACCCTCAAAACCGGAACAACTTCGCATCGTGGAGGCAAA
ACGAGCTCGAGAGGATGTCCCCTGAAGAAATGTTGGCAATCTCAAGGTCTGATTACTACTGTTGGTGCTTGGATTCTGCGTAAA
AACACTGAGAAATGCCACTATTTCATGCT
SEQIDNO: 213
TAATAATATATACTTCACCTATATTTCATCACTAAAACCAGCTATGGAGTGTGCAGATAACCCAAGGTATGTCTCAATCTCAACCC
TAGACACATGCATATGAAACCCAACAATGTAGTAATTTTGTTGATGCAATGATCGAACAAGGCCGAGATTATGATGGTATTGGTC
GGTTCACCCCATTTGAGATGGGTCGGAGAGCCAGTTGTTCCGGTAATAGATAATGGAGGAAGTAAGCTCTCTCATGGAGAGCT
ATGAAGAAAGATGGAGAAGAGAAGAGAGGAAAAAGTCCCTTCTGCTGTTTCCTTGTCCCCTCTTTTTTCGTTTTCCGTAGGCTTT
GGTAATAATGGTCTAATACTTAGGTTGTCATAGTATTACGAGGATGTGACCGGAGATTTGATATGTATAATAATTTTATATATGTA
TAACAAGTTTCAATGATTAATGTTGTAATGCAGGAACAAATGTGCAGCTTGCTATAGACAGTTCAATAGGATGGAACATTTGGCT
GATCATATGAGAACTTCGTTTCATTCAGTTCATGAACCTACTTGTGGTGTTTGTAAAAAGCACTGCCGATCCTTTGAATCTCTAAG
GGAACATCTAATAGGTAACTAATTCAATTCATTTGTAATATATATATATATATATATGTCACAGATTCTTGAAAACTATATAAATTTG
TTAATAAATACAGGTCCATTGCCCAAACAAGAATGCAGGAACGTGTTCAACATCCGAGGCTGCAAGTTTTGTTTAGCCATTCTCG
ATAGCCCTTATGCTCTTAGGGTTCATCAAGACAGATGCCAGCTCTCTGGAGTGAGCCATGTATTAATTCAAGTCAAATTATCTTT
ATATACGAACATTTATACGTAGGTAAAAGTATCATAAAGGTCTCTGTACTAAAAGTTGGATTGCGTTTGTTCCCTCTACTCAAAAA
ATAAGCAAATTGGTACTTATACATAAGATCAAATAGTAAATTAGTCATTCTGTTGAAAATTTCATCTATTTCTACTGTTAAAAAATG
ATCTCTGTTGAAAATTTCATCTATTTCTACTGTTAAAAAATGATCTCTATACGTCAGAATGAAGTACATGTGGCACGCCATGTAGA
ATCGTCTAGTTATTCTATCAGTCTTGTCAATTTTTAACAGTAGAATTAGACAAAATTTTTAATAGAAAAAACTAGTTTGCTTTTTGAT
CTAATGTATAGGGATTAATTTACCCCCTTTTCTATAGTAAAGGAGGGCAAAATGCAATCTAACTCTTAATGCAGGAGACTCCATG
ATAATTTTATTATATGTATATTTATAATGGCACTTTTTTTCCCATATTGAAATTGATTTAAAATGTGGGTTTTACTTGTAATAGGGGA
TATCAGCTTACATGGCTAACTTGGGTCTTAGAGATAGCTTAACAATCGACAATGGTTATTCAAGAGGCCCACAAGTTGTTGCACT
TGCATGCAAAACTGTTGGTGGTGGAAGCGATAGGTCATTGGATCTTTGTGCAAGGGTTTGCATCATTGATGAAAATGAGAATAT
AATCTTCCATACTTATGTTAAACCTTCTATTCCAGTTACAAACTATAGGTATGCCCATAGGATAAATCCGAGTAATCCCTAATCTTT
TCATGTTCAACATATATTCAAACTTGGTCCGACACTTGCCTTAGTCTGAGTAACATAGGTTCCTTGTTTGAATTACTTTCAGGTAC
GAAACAACAGGCATTCGACCAGAACATTTGAGGGATGCAATGCCATTGAGACAAGTTCAAAGAAAGGTTCAAGATTTCCTTTGC
AATGGAGAACCAACGTGGAAAATTCGATCACCTAAAGGTGGAAAAGCTAGGATTCTTGTAGGGCATGGTCTTGATCATGACCTA
GATAAAATGCAAGTCGAATATCCACCAATTATGATAAGGTAAAAGATTAAGGATGCCATATATATATATATAACATACATTCAAAA
GGAATATATATGAGTCAAACTACAATCTTTTTTCAATACAGCTTGCAGGTTTTGTATTATTCGAACTCTTCAGTTTTCTTAAAGTAT
TCATGTTCGATATTTGTTTACAGGGATACTGCAAAATATCCTCCCTTGATGAAAACAAGCAAACTTAGCAACTCACTCAAGTACTT
AACTCAAGCATATTTGGGGTAAGTATCTATAGATCATCCATTTCTCCCCTATACGATCGGTATCCGATCGATGATCGTTAACGAG
AGAGTGATGCATCATGTTGGGTGTGAATTAGGTATGACATTCAAAATGGCATTCAAGATCCTTATGAGGATTGTGTTGCAACAAT
GAGGCTTTACGTTAGGATGAGGAGACAAGTTCATAGGAGACAAGACTATCCGTTGGCTTCCGACCCTCAAAACCGGAACAACTT
CGCATCGTGGAGGCAAAACGAGCTCGAGAGGATGTCCCCTGAAGAAATGTTGGCAATCTCAAGGTCTGATTACTACTGTTGGT
GCTTGGATTCTGCGTAAAAACACTGAGAAATGCCACTATTTCATTCTCCTCCCCCCCCCCAATTACTTG
SEQIDNO: 214
MECAGNPRNKCAACYRQFNRMEHLVEHMRTSFHSAHETTCGVCKKHSRSFESLRENLIGPLPKQECRNVFNIRGCKFCLAILDSPYA
LRVHQDRCQLSGVNHVLIQGISAYMANLGLRDSLTIDNGYSRGLQVVALACKTVGGGSDRSLDLCARVCIIDENENIIFHTYVKPPIPVT
NYRYETTGIRPEHLRDAMPLRQVQRKVQDFLCNGEPTWKIRSPKGGKARILVGHGLDHDLDKMQVEYPPIMIRDTAKYPPLMKTSKL
SNSLKYLTQAYLGYDIQNGIQDLYEDCVATMRLYVRMRRQIHRRQDYPLASDPQNRNNFASWRQNELERMSPVLFQ
SEQIDNO: 215
ATGGAGTGTGCAGGTAACCCAAGGAACAAATGTGCAGCTTGCTATAGACAGTTCAATAGGATGGAACATTTAGTTGAACATATG
AGAACTTCGTTTCATTCAGCTCATGAAACTACTTGTGGTGTTTGTAAAAAGCACAGCCGATCCTTTGAATCTCTAAGGGAAAATC
TAATAGGTCCATTGCCCAAACAAGAATGCAGGAACGTGTTCAACATCCGAGGCTGCAAGTTTTGTTTAGCCATTCTCGATAGCC
CTTATGCTCTTAGGGTTCATCAAGACAGATGCCAGCTCTCTGGAGTGAACCATGTATTAATTCAAGGGATATCAGCTTACATGGC
TAACTTGGGTCTTAGAGATAGCTTAACAATCGACAATGGTTATTCAAGAGGCCTACAAGTTGTTGCACTTGCATGCAAAACTGTT
GGTGGTGGAAGCGATAGGTCATTGGATCTTTGTGCAAGGGTTTGCATCATTGATGAAAATGAGAATATAATCTTCCATACTTATG
TTAAACCTCCTATTCCAGTCACAAACTATAGGTACGAAACAACAGGCATTCGACCAGAACATTTGAGGGACGCAATGCCATTGA
GACAAGTTCAAAGAAAGGTTCAAGATTTCCTTTGCAATGGAGAACCAACGTGGAAAATTCGATCACCTAAAGGTGGAAAAGCTA
GGATTCTTGTAGGGCATGGTCTTGATCATGACCTAGATAAAATGCAAGTCGAATATCCACCAATTATGATAAGGGATACTGCAAA
ATATCCTCCCTTGATGAAAACAAGCAAACTTAGCAACTCACTCAAATACTTAACTCAAGCATATTTGGGGTATGACATTCAAAATG
GCATTCAAGATCTTTATGAGGATTGTGTTGCAACAATGAGGCTTTACGTTAGGATGAGGAGACAAATTCATAGGAGACAAGACTA
TCCGTTGGCTTCCGACCCTCAAAACCGGAACAACTTCGCGTCGTGGAGGCAAAACGAGCTCGAGAGGATGTCCCCTGTGTTGT
TCCAATAG
SEQIDNO: 216
ATGGAGTGTGCAGGTAACCCAAGGTATGTATATGAAACCCAACAATTTTGTTGATGCAATGATCGAACAAGGCGGAGATTATGA
TGGTATTGGTCGGTTCACCCCATTTGAGATGGGTCGGAGAGCCAGTTGTTCTGGTAATAGATAATGGAGGAAGTAAGCTCTCTC
ATGGAGAGTTATGGAGAAAGATGGAGAAGAGAAGAGAGGAAAAAGTCCCTTCTGCTGTTTCCTTGTCCCCTCTTTTTTTTCCGTA
GGCTTTGGAAATAATGGTCTAATATACTTAGGTTGTCATAGAGTTACGAGGATGTGACCGGAGATTTGATATGTATAATAATTTTA
TATATGTATAACAAGTTTCAATAATTAATGTTGTAATGCAGGAACAAATGTGCAGCTTGCTATAGACAGTTCAATAGGATGGAACA
TTTAGTTGAACATATGAGAACTTCGTTTCATTCAGCTCATGAAACTACTTGTGGTGTTTGTAAAAAGCACAGCCGATCCTTTGAAT
CTCTAAGGGAAAATCTAATAGGTAACTAATTCAATTCATTTGTAATATATATATATATGTCACGGATTCTTGAAAACTATATAAATT
TGTTAATAAATACAGGTCCATTGCCCAAACAAGAATGCAGGAACGTGTTCAACATCCGAGGCTGCAAGTTTTGTTTAGCCATTCT
CGATAGCCCTTATGCTCTTAGGGTTCATCAAGACAGATGCCAGCTCTCTGGAGTGAACCATGTATTAATTCAAGTCAATTTGTCT
TTATAAACATACATGTATCCGTAGGTAAAAGTATCATAAATGTCTCTGTACTAAAAGTTGGATTGCATTTATTCCCTCTACTCAAAA
AACGAGCAAATTAGCACTTATACATAAGATCAAAGAGAAAACTAGTCCTTCTGTTAAAAATTTCATCCATTTCTACTGTTAAAAAAT
GATCTCTATACGTCAGAATGAAGTACACGTGGCACACCATGTAGAATTGTCTAGTTATTTTGTCAGTCACGTCAATTTTTGATAGT
AGAATTGGATAAAATTTTTAATAGAAAAGATTAGTTTGCTTTTTGATCTAATGTATATGGACCAATTTACCCCCTTTTCTTTAGTAA
AGAAGGACAAAATGTAATTTAACTCTTAGTGCAGGAGACTCCATGATACTTTTATTATATGTATATTTATAATGGCACATTTTTTCC
CATATTGAAATTGATTTAAAATGTGGGTTTTACTTGTAATAGGGGATATCAGCTTACATGGCTAACTTGGGTCTTAGAGATAGCTT
AACAATCGACAATGGTTATTCAAGAGGCCTACAAGTTGTTGCACTTGCATGCAAAACTGTTGGTGGTGGAAGCGATAGGTCATT
GGATCTTTGTGCAAGGGTTTGCATCATTGATGAAAATGAGAATATAATCTTCCATACTTATGTTAAACCTCCTATTCCAGTCACAA
ACTATAGGTATGCCCATAGGATAAATCCGAGTAATCCCTAATCTTTTCATGTTCAACATATATTCAAACTTGGTCCGACACTTGCC
TTAGTCTGAGTAACATGGGTTCCTTGTTTGAATTACTTTCAGGTACGAAACAACAGGCATTCGACCAGAACATTTGAGGGACGCA
ATGCCATTGAGACAAGTTCAAAGAAAGGTTCAAGATTTCCTTTGCAATGGAGAACCAACGTGGAAAATTCGATCACCTAAAGGT
GGAAAAGCTAGGATTCTTGTAGGGCATGGTCTTGATCATGACCTAGATAAAATGCAAGTCGAATATCCACCAATTATGATAAGGT
AAAAGTTTAAGGATGCTATATATATATATAACATACATTCAAAAGGAATATATATAAGTCAAACTACAATCTTTTTTCAATACAGCT
TGCAGGTTTTGTATTATTCGAACTCTTCAGTTTTCTTAAAGTATTCATGTTCGATATTTGTTTACAGGGATACTGCAAAATATCCTC
CCTTGATGAAAACAAGCAAACTTAGCAACTCACTCAAATACTTAACTCAAGCATATTTGGGGTAAGTATCTATAGATCAACCATTT
CTCCCCTATACGATCGGTATCCGATCGATGATCGTTAACGAGAGAGTGATGCATCATGTTGGGTGTGAATTAGGTATGACATTC
AAAATGGCATTCAAGATCTTTATGAGGATTGTGTTGCAACAATGAGGCTTTACGTTAGGATGAGGAGACAAATTCATAGGAGACA
AGACTATCCGTTGGCTTCCGACCCTCAAAACCGGAACAACTTCGCGTCGTGGAGGCAAAACGAGCTCGAGAGGATGTCCCCTG
TGTTGTTCCAATAG
SEQIDNO: 217
MECADNPRNKCAACYRQFNRMEHLVDHMRTLFHSVHEPTCGVCKKHCRSFESLREHLIGPLPKQECRNAFNIRGCKFCLAILDSPYA
LRGISAYMANLGLRDSLTIDNGYSRGPQVVALACKTVGGGSDRSLDLCARVCIIDEKENIIFHTYVKPPIPVTNYRYETTGIRPEHLRDA
MPLRQVQRKVQDFLCNGEPTWKIRSPKGGKARILVGHGLDHDLDKMQVEYPPIMIRDTAKYPPLMKTSKLSNSLKYLTQAYLGYDIQ
NGIQDPYEDCVATMRLYETRLPVGFRPSNRNNFASWRQNELERMSPEEMLAISSYLSNRHFNKCFGFNQVQFEMKTEFEYERKQN
EIEKICGSVEATCAPQYTVLPHMVSFSRCQIE
SEQIDNO: 218
ATGGAGTGTGCAGATAACCCAAGGAACAAATGTGCAGCTTGCTATAGACAGTTCAATAGGATGGAACATTTGGTTGATCATATG
AGAACTTTGTTTCATTCAGTTCATGAACCTACTTGTGGTGTTTGTAAAAAGCACTGCCGATCCTTTGAATCTCTAAGGGAACATCT
AATAGGTCCATTGCCCAAACAAGAATGCAGGAACGCGTTCAACATCCGAGGCTGCAAGTTTTGTTTAGCCATTCTCGATAGCCC
TTATGCTCTTAGGGGGATATCAGCTTACATGGCTAACTTGGGGCTTAGAGATAGCTTAACAATCGACAATGGTTATTCAAGAGG
CCCACAAGTTGTTGCACTTGCATGCAAAACTGTTGGTGGTGGAAGCGATAGGTCATTGGATCTTTGTGCAAGGGTTTGCATCAT
TGATGAAAAGGAGAATATAATCTTCCATACTTATGTTAAACCTCCTATTCCAGTCACAAACTATAGGTACGAAACAACAGGCATTC
GACCAGAACATTTAAGGGATGCAATGCCATTGAGACAAGTTCAAAGAAAGGTTCAAGATTTCCTTTGCAATGGAGAACCAACGT
GGAAAATTCGATCACCTAAAGGTGGAAAAGCTAGGATTCTTGTAGGGCATGGTCTTGATCATGACCTAGATAAAATGCAAGTCG
AATATCCACCAATAATGATAAGGGATACTGCAAAATATCCTCCCTTGATGAAAACAAGCAAACTTAGCAACTCACTCAAGTACTTA
ACTCAAGCATATTTGGGGTATGACATTCAAAATGGCATTCAAGATCCTTATGAGGATTGTGTTGCAACAATGAGGCTTTACGAGA
CAAGACTACCCGTTGGCTTCCGACCCTCAAACCGGAACAACTTCGCGTCGTGGAGGCAAAACGAGCTCGAGAGGATGTCCCCT
GAAGAAATGTTGGCAATCTCAAGTTATTTAAGTAATAGGCATTTTAATAAGTGCTTTGGCTTTAATCAGGTCCAATTTGAAATGAA
GACCGAGTTTGAATACGAGCGAAAACAAAATGAGATAGAAAAAATATGCGGGAGTGTCGAAGCAACATGTGCGCCACAGTACA
CTGTTCTGCCGCATATGGTTTCGTTTAGTCGCTGCCAAATTGAATGA
SEQIDNO: 219
ATGGAGTGTGCAGATAACCCAAGGTATGTCTCAATCTCAACCCTAGACATATGTATATGAAACCCAACAATGTAGTAATTTTGTT
GATGCAATGATCGAACAAGGCGGAGATTATGATGGTATTGGTCGGTTCACCCCATTTGAGATGGGTCGGAGAGCCGGTTGTTC
TGGTAATAGATAATGGAGGAAGTAAGCTCTCTCATGGAGAGTTATGGAGAAAGATGGAGAAGAGAAGAGAGGAAAAAGTCCCTT
CTGCTGTTTCCTTGTCCCCTCTTTTTTTTCCCGTAGGCTTTGGTAATAATGGTCTAATATACTTAGGTTGTCATAGAGTTACGAGG
ATGTGACCGGAGATTTGATATGTATAATAATTTTATATATGTATGACAAGTTTCAATGATTAATGTTGTAATGCAGGAACAAATGT
GCAGCTTGCTATAGACAGTTCAATAGGATGGAACATTTGGTTGATCATATGAGAACTTTGTTTCATTCAGTTCATGAACCTACTTG
TGGTGTTTGTAAAAAGCACTGCCGATCCTTTGAATCTCTAAGGGAACATCTAATAGGTAACTAATTCAATTCATTTGTAATATATA
TATGTCACGGATTCTTGAAAACTATATAAATTTGTTAATAAATACAGGTCCATTGCCCAAACAAGAATGCAGGAACGCGTTCAAC
ATCCGAGGCTGCAAGTTTTGTTTAGCCATTCTCGATAGCCCTTATGCTCTTAGGGTTCATCAAGACAGATGCCAGCTCTCTGGA
GTGAACCATGTATTAATTCAAGTCAAATTGTCTTTATATACATACATATATACGTAGATAAAAGTATCATAAAGGTCCTATACTAAA
AGTTGGATTGTGTTTATTCTCTCTACTCAAAAATGAGTAAATTAGTACTTATATATAAGATCAAAGAGTAAACTAGTCCTTCTGTTA
AAAATTTCATACATTTCTACTGTTAAAAAATGATCTCTATACGTCAGAATAAAGTACATGTGGCACGTCATGTAGAATTGTCTAGT
TATTCTGTCAGCCACGTCAATTTTTAACAGTAAAATTGGATAAATTTTTTAATAGAAAAGACTAGTTTTCTTTTTGATCTAATGTATA
GGAACCAATTTACCCCTTTTTCTTTAGTAAAGGAGGGCAAAATGTAATCTAACTTTTAGTGCAGGAGACTCCATGATACTTCTATT
GTATGTATATTTATAATGGCACTTTTTTTCCCATATTGAAATTGATTTAAAATGTGGGTTTTACTTGTAATAGGGGATATCAGCTTA
CATGGCTAACTTGGGGCTTAGAGATAGCTTAACAATCGACAATGGTTATTCAAGAGGCCCACAAGTTGTTGCACTTGCATGCAA
AACTGTTGGTGGTGGAAGCGATAGGTCATTGGATCTTTGTGCAAGGGTTTGCATCATTGATGAAAAGGAGAATATAATCTTCCAT
ACTTATGTTAAACCTCCTATTCCAGTCACAAACTATAGGTATGCCCATAGGATAAATCCGAGTAATCCCTAATCTTTTCATGTTCA
ACATATATTCAAACTTGGTCCGATACTTGCCTTAGTCTGAGTAACATAGGTTCCTTGTTTGAATTACTTTCAGGTACGAAACAACA
GGCATTCGACCAGAACATTTAAGGGATGCAATGCCATTGAGACAAGTTCAAAGAAAGGTTCAAGATTTCCTTTGCAATGGAGAA
CCAACGTGGAAAATTCGATCACCTAAAGGTGGAAAAGCTAGGATTCTTGTAGGGCATGGTCTTGATCATGACCTAGATAAAATG
CAAGTCGAATATCCACCAATAATGATAAGGTAAAAGTTTAAGGATGCCATATATATATATAACATACATTCAAAAGGAATATATAT
AAGTCAAACTACAATCTTTTTTCAATACAGCTTGCAGGTTTTGTATTATTCGAACTCTTCGGTTTTCTTAAAGTATTCATGTTCGAT
ATTTGTTTACAGGGATACTGCAAAATATCCTCCCTTGATGAAAACAAGCAAACTTAGCAACTCACTCAAGTACTTAACTCAAGCAT
ATTTGGGGTAAGTGTCTATAGATCATCCATTTCTCCCCTATACGATCGGTATCCGATCGACGATCGTTAACGAGAGAGTGATGC
ATCATGTTGGGTGTGAATTAGGTATGACATTCAAAATGGCATTCAAGATCCTTATGAGGATTGTGTTGCAACAATGAGGCTTTAC
GTTAGGATGAGGAGACAAGTTCATAGGAGACAAGACTACCCGTTGGCTTCCGACCCTCAAACCGGAACAACTTCGCGTCGTGG
AGGCAAAACGAGCTCGAGAGGATGTCCCCTGAAGAAATGTTGGCAATCTCAAGGTCTGATTACTACTGTTGGTGCTTGGATTCT
GCGTAAAGACACTGAGAAATGCCACTATTTCATTCTCCTCCCCCCCCCCAATTACTTGTTATAGCAATAAGAAGGAAGTAGTTCA
TTGTTATTTCCCTAGTGTTTATTTGTACTAGTAAACAATTTATTGGATTATATATACATGTATGTATGCTAGTGAAATCATCTAAATA
AATGGAATTATAAGAGTATTCATAGAGTAAGTTTAGCTCGGTTGGTTTATAGACTACAGTCCTCTTTCAAAAAAAAAAAAACTGAA
ATTCCAAAATAAACATGATAAATACATTAATAGACACATTAAAAGTTTAAAATAACTAATAAGAAAGCATACAAACTTAACAAAATT
AAACTGAATGAATAATCAAAATATTATGAATTTAACAATTGAAATAACATTCAAATATTAAATTTCGGTTAATTTGAGTGAACTGATT
ATTTTTTTATAATTATCTGAACTGAATGAAGTTTATTCTGTTAAATAATCAACCTATAGATACCGTAAAAAATTCCAACAAGAACAC
AAATTCAACATATATAAAGAGATTATGAAATATGAATCGTCATAACAATATTATTTCAATTCTCTAATAAATTTGCAATTTTCAGCTG
CCTGTTTATCTTGGGTTTTTCTCCCAGGATGATGATCAATGTTGGGAAATGTGGACAACTTTTTCATATGTTTTAGTTGAGAGTTT
GATATTTACCATGCATTTGGCACCATCTTCACCTCATGGTTAATATTGATTCCCTTTTTGTGAGGACCACTCGACACCTACAACTT
CATCTTTGAATCTCATTGGTTTCAAATGGAATCAGATTTCCATAAAAGTTCATCCTCTGATTTTTCTTGGCTTTCTTGATCAAACAC
CACCATCAAAGTCTTCATCATATAAATATATTTGTACTTTTTTCACTTATGAGTTTTTAAGTAAATATTATATTTAATTGCATAATTAG
GATAAATTTCATAGGTTGCATCATATTTATATTTTATGTTGTTTTACTTATTTTTAGTTATTTAAGTAATAGGCATTTTAATAAGTGCT
TTGGCTTTAATCAGGTCCAATTTGAAATGAAGACCGAGTTTGAATACGAGCGAAAACAAAATGAGATAGAAAAAATATGCGGGA
GTGTCGAAGCAACATGTGCGCCACAGTACACTGTTCTGCCGCATATGGTTTCGTTTAGTCGCTGCCAAATTGAATGA
SEQIDNO: 220
MECADNPRNKCAACYRQFNRMEHLVDHMRTSFHSVHEPTCGVCKKHCRSFESLREHLIGPLPKQECRNAFNIRGCKFCLAILDSPY
ALRVHQDRCQLSGVNHGISAYMANLGLRDSLTIDNGYSRGPEVVALACKTVGGGSDRSLDLCARVCIIDEKENIIFHTYVKPPIPVTNY
RYETTGIRPEHLRDAMPLRQVQRKVQDFLCNGEPTWKIRSPKGGKARILVGHGLDHDLDKMQVEYPPKMIRDTAKYPPLMKTSKLSN
SLKYLTQAYLGYDIQNGIQDPYEDCVATMRLYVRMRRQVHRRQDYPLASDPQNRNNFASWRQNELERMSPEEMLAISRSDYYCWC
LDSA
SEQIDNO: 221
ATGGAGTGTGCAGATAACCCAAGGAACAAATGTGCAGCTTGCTATAGACAGTTCAATAGGATGGAACATTTGGTTGATCATATG
AGAACTTCGTTTCATTCAGTTCATGAACCTACTTGTGGTGTTTGTAAAAAGCACTGCCGATCCTTTGAATCTCTAAGGGAACATCT
AATAGGTCCATTGCCCAAACAAGAATGCAGGAACGCGTTCAACATCCGAGGCTGCAAGTTTTGTTTAGCCATTCTCGATAGCCC
TTATGCTCTTAGGGTTCATCAAGACAGATGCCAGCTCTCTGGAGTGAACCATGGGATATCAGCTTACATGGCTAACTTGGGGCT
TAGAGATAGCTTAACAATCGACAATGGTTATTCAAGAGGCCCAGAAGTTGTTGCACTTGCATGCAAAACTGTTGGTGGTGGAAG
CGATAGGTCATTGGATCTTTGTGCAAGGGTTTGCATCATTGATGAAAAGGAGAATATAATCTTCCATACTTATGTTAAACCTCCTA
TTCCAGTCACAAACTATAGGTACGAAACAACAGGCATTCGACCAGAACATTTAAGGGATGCAATGCCATTGAGACAAGTTCAAA
GAAAGGTTCAAGATTTCCTTTGCAATGGAGAACCAACGTGGAAAATTCGATCACCTAAAGGTGGAAAAGCTAGGATTCTTGTAG
GGCATGGTCTTGATCATGACCTAGATAAAATGCAAGTCGAATATCCACCAAAAATGATAAGGGATACTGCAAAATATCCTCCCTT
GATGAAAACAAGCAAACTTAGCAACTCACTCAAGTACTTAACTCAAGCATATTTGGGGTATGACATTCAAAATGGCATTCAAGAT
CCTTATGAGGATTGTGTTGCAACAATGAGGCTTTACGTTAGGATGAGGAGACAAGTTCATAGGAGACAAGACTACCCGTTGGCT
TCCGACCCTCAAAACCGGAACAACTTCGCGTCGTGGAGGCAAAACGAGCTCGAGAGGATGTCCCCTGAAGAAATGTTGGCAAT
CTCAAGGTCTGATTACTACTGTTGGTGCTTGGATTCTGCATAA
SEQIDNO: 222
ATGGAGTGTGCAGATAACCCAAGGTATGTCTCAATCTCAACCCTAGACATATGTATATGAAACCCAACAATGTAGTAATTTTGTT
GATGCAATGATCGAACAAGGCGGAGATTATGATGGTATTGGTCGGTTCACCCCATTTGAGATGGGTCGGAGAGCCGGTTGTTC
TGGTAATAGATAATGGAGAAAGTAAGCTCTCTCATGGAGAGTTATGGAGAAAGATGGAGAAGAGAAGAGAGGAAAAAGTCCCTT
CTGCTGTTTCCTTGTCCCCTCTTTTTTTTCCCGTAGGCTTTGGTAATAATGGTCTAATATACTTAGGTTGTCATAGAGTTACGAGG
ATGTGACCGGAGATTTGATACGTATAATAATTTTATATATGTATGACAAGTTTCAATGATTAATGTTGTAATGCAGGAACAAATGT
GCAGCTTGCTATAGACAGTTCAATAGGATGGAACATTTGGTTGATCATATGAGAACTTCGTTTCATTCAGTTCATGAACCTACTT
GTGGTGTTTGTAAAAAGCACTGCCGATCCTTTGAATCTCTAAGGGAACATCTAATAGGTAACTAATTCAATTCATTTGTAATATAT
ATACATATATATATATATATGTCACGGATTCTTGAAAACTATATAAATTTGTTAATAAATACAGGTCCATTGCCCAAACAAGAATGC
AGGAACGCGTTCAACATCCGAGGCTGCAAGTTTTGTTTAGCCATTCTCGATAGCCCTTATGCTCTTAGGGTTCATCAAGACAGAT
GCCAGCTCTCTGGAGTGAACCATGTATTAATTCAAGTCAAATTGTCTTTATATACATACATATATACGTAGGTAAAAGTATCATAA
AGGTCCTGTACTAAAAGTTGGATTGTGTTTATTCCCTCTACTCAAAAAATGAGCAAATTAGTACTTATACATAAGACCAAAGAGTA
AACTAGTCCTTCTGTTGAAAATTTCATACATTTCTACTGTTAAAAAATGATCTCTATACGTCAGAATGAAGTACATGTGGCACGTC
ATGTAGAATTGTCTAGTTATTCTGTCAGCCACGTCAATTTTTAACAGTAGAATTGGATAAATTTTTAATAGAAAAGACTAGTTTTCT
TTTTGATCTAATGCATAGGGACCAATTTACCCCCTTTTCTTTAGTAAAGGAGGGCAAAATGTAATCTAACTTTTAGTGCAGGGGA
CTCCATGATACTTCTATGTATATTTATAATGGAACTTTTTTTCCCATATTGAAATTGATTTAAAATGTGGGTTTTACTTGTAATAGG
GGATATCAGCTTACATGGCTAACTTGGGGCTTAGAGATAGCTTAACAATCGACAATGGTTATTCAAGAGGCCCAGAAGTTGTTG
CACTTGCATGCAAAACTGTTGGTGGTGGAAGCGATAGGTCATTGGATCTTTGTGCAAGGGTTTGCATCATTGATGAAAAGGAGA
ATATAATCTTCCATACTTATGTTAAACCTCCTATTCCAGTCACAAACTATAGGTATGCCCATAGGATAAATCCGAGTAATCCCTAA
TCTTTTCATGTTCAACATATATTCAAACTTGGTCCGATACTTGCCTTAGTCTGAGTAACATAGGTTCCTTGTTTGAATTACTTTCAG
GTACGAAACAACAGGCATTCGACCAGAACATTTAAGGGATGCAATGCCATTGAGACAAGTTCAAAGAAAGGTTCAAGATTTCCT
TTGCAATGGAGAACCAACGTGGAAAATTCGATCACCTAAAGGTGGAAAAGCTAGGATTCTTGTAGGGCATGGTCTTGATCATGA
CCTAGATAAAATGCAAGTCGAATATCCACCAAAAATGATAAGGTAAAAGTTTAAGGATGCCATATATATATATATATAACATACAT
TCAAAAGGAATATATATAAGTCAAACTACAATCTTTTTTCAATACAGCTTGCAGGTTTTGTATTATTCGAACTCTTCGGTTTTCTTA
AAGTATTCATGTTCGATATTTGTTTACAGGGATACTGCAAAATATCCTCCCTTGATGAAAACAAGCAAACTTAGCAACTCACTCAA
GTACTTAACTCAAGCATATTTGGGGTAAGTATCTATAGATCATCCATTTCTCCCCTATACGATCGGTATCCGATCGATGATCGTTA
ACGAGAGAGTGATGCATCATGTTGGGTGTGAATTAGGTATGACATTCAAAATGGCATTCAAGATCCTTATGAGGATTGTGTTGCA
ACAATGAGGCTTTACGTTAGGATGAGGAGACAAGTTCATAGGAGACAAGACTACCCGTTGGCTTCCGACCCTCAAAACCGGAA
CAACTTCGCGTCGTGGAGGCAAAACGAGCTCGAGAGGATGTCCCCTGAAGAAATGTTGGCAATCTCAAGGTCTGATTACTACT
GTTGGTGCTTGGATTCTGCATAA
SEQIDNO: 223
MECAGNPRNKCAACYRQFNRMEHLVEHMRTSFHSVHEPTCGVCKKHCRSFESLREHLIGPLPKQECRNVFNIRGCKFCLAILDSPY
ALRVHQDRCQLSGVNHGISAYMANLGLRDSLTIDNGYSRGPQVVALACKTVGGGSDRSLDLCARVCIIDENENIIFHTFVKPPIPVTNY
RYETTGIRPEHLRDAMPLRQVQRKVQDFLCNGEPTWKIRSPKGGKARILVGHGLDHDLDKMQVEYPPIMIRDTAKYPPLMKTSKLSN
SLKYLTQAYLGYDIQNGIQDPYEDCVATMRLYVRMRRQVHRRQDYPLASDPQNRNNFASWRQNELERMSPEEMLAISRSDYYCWC
LDSA
SEQIDNO: 224
ATGGAGTGTGCAGGTAACCCAAGGAACAAATGTGCAGCTTGCTATAGACAGTTCAATAGGATGGAACATTTAGTTGAACATATG
AGAACTTCGTTTCATTCAGTTCATGAACCTACTTGTGGTGTTTGTAAAAAGCACTGCCGATCCTTTGAATCTCTAAGGGAACATCT
AATAGGTCCATTGCCCAAACAAGAATGCAGGAACGTGTTCAACATCCGAGGCTGCAAGTTTTGTTTAGCCATTCTCGATAGCCC
TTATGCTCTTAGGGTTCATCAAGACAGATGCCAGCTCTCTGGAGTGAACCATGGGATATCAGCTTACATGGCTAACTTGGGTCT
TAGAGATAGCTTAACAATCGACAATGGTTATTCAAGAGGCCCACAAGTTGTTGCACTTGCATGCAAAACTGTTGGTGGTGGAAG
CGATAGGTCATTGGATCTTTGTGCAAGGGTTTGCATCATTGATGAAAATGAGAATATAATCTTCCATACTTTTGTTAAACCTCCTA
TTCCAGTCACAAACTATAGGTACGAAACAACAGGCATTCGACCAGAACATTTGAGGGACGCAATGCCATTGAGACAAGTTCAAA
GAAAGGTTCAAGATTTCCTTTGCAATGGAGAACCAACGTGGAAAATTCGATCACCTAAAGGTGGAAAAGCTAGGATTCTTGTAG
GGCATGGTCTTGATCATGACCTAGATAAAATGCAAGTCGAATATCCACCAATTATGATAAGGGATACTGCAAAATATCCTCCCTT
GATGAAAACAAGCAAACTTAGCAACTCACTCAAATACTTAACTCAAGCATATTTGGGGTATGACATTCAAAATGGCATTCAAGAT
CCTTATGAGGATTGTGTTGCAACAATGAGGCTTTACGTTAGGATGAGGAGACAAGTTCATAGGAGACAAGACTATCCGTTGGCT
TCCGACCCTCAAAACCGGAACAACTTCGCGTCGTGGAGGCAAAACGAGCTCGAGAGGATGTCCCCTGAAGAAATGTTGGCAAT
CTCAAGGTCTGATTACTACTGTTGGTGCTTGGATTCTGCGTAA
SEQIDNO: 225
ATGGAGTGTGCAGGTAACCCAAGGTATGTATATGAAACCCAACAATGTAGTAATTTTGTTGATGCAATGATCGAACAAGGCGGA
GATTATGATGGTATTGGTCGGTTCACCCCATTTGAGATGGGTCGGAGAGCCAGTTGTTCTGGTAATAGATAATGGAGGAAGTAA
GCTCTCTCATGGAGAGTTATGGAGAAAGATGGAGAAGAGAAGAGAGGAAAAAGTCCCTTCTGCTGTTTCCTTGTCCCCTCTTTT
TTTTTCCGTAGGCTTTGGAAATAATGGTCTAATATACTTAGGTTGTCATAGAGTTACGAGGATGTGACCGGAGATTTGATATGTAT
AATAATTTTATATATGTATAACAAGTTTCAATGATTAATGTTGTAATGCAGGAACAAATGTGCAGCTTGCTATAGACAGTTCAATA
GGATGGAACATTTAGTTGAACATATGAGAACTTCGTTTCATTCAGTTCATGAACCTACTTGTGGTGTTTGTAAAAAGCACTGCCG
ATCCTTTGAATCTCTAAGGGAACATCTAATAGGTAACTAATTCAATTCATTTGTAATATATATATATATATATATGTCACGGATTCT
TGAAAACTATATAAATTTGTTAATAAATACAGGTCCATTGCCCAAACAAGAATGCAGGAACGTGTTCAACATCCGAGGCTGCAAG
TTTTGTTTAGCCATTCTCGATAGCCCTTATGCTCTTAGGGTTCATCAAGACAGATGCCAGCTCTCTGGAGTGAACCATGTATTAA
TTCAAGTCAATTTGTCTTTATAAACATACATGTATCCGTAGGTAAAAGTATCATAAATGTCTCTATACTAAAAGTTGGATTGCATTT
ATTCCCTCTACTCAAAAAACGAGCAAATTAGCACTTATACATAAGATCAAAGAGAAAACTAATCCTTCTGTTAAAAATTTCATCCA
TTTCTACGGTTAAAAAATGATCTCTTTACGTCAGAATGAAGTACACGTGGCACACCATGTAGAATTGTCTAGTTATTTTGTCAGTC
ACGTCAATTTTTGATAGTAGAGTTGGATAAAATTTTTAATAGAAAAGACTAGTTTGCTTTTTGATCTAATGTATATGGACCAATTTA
CCCCCTTTTCTTTAGTAAAGAAGGACAAAATGTAATTTAACTCTTAGTGCAGGAGACTCCATGATACTTTTATTATATGTATATTTA
TAATGGCACATTTTTTCCCATGTTGAAATTGATTTAAAATGTGGGTTTTACTTGTAATAGGGGATATCAGCTTACATGGCTAACTT
GGGTCTTAGAGATAGCTTAACAATCGACAATGGTTATTCAAGAGGCCCACAAGTTGTTGCACTTGCATGCAAAACTGTTGGTGG
TGGAAGCGATAGGTCATTGGATCTTTGTGCAAGGGTTTGCATCATTGATGAAAATGAGAATATAATCTTCCATACTTTTGTTAAAC
CTCCTATTCCAGTCACAAACTATAGGTATGCCCATAGGATAAATCCGAGTAATCCCTAATCTTTTCATGTTCAACATATATTCAAA
CTTGGTCCGACACTTGCCTTAGTCTGAGTAACATGGGTTCCTTGTTTGAATTACTTTCAGGTACGAAACAACAGGCATTCGACCA
GAACATTTGAGGGACGCAATGCCATTGAGACAAGTTCAAAGAAAGGTTCAAGATTTCCTTTGCAATGGAGAACCAACGTGGAAA
ATTCGATCACCTAAAGGTGGAAAAGCTAGGATTCTTGTAGGGCATGGTCTTGATCATGACCTAGATAAAATGCAAGTCGAATATC
CACCAATTATGATAAGGTAAAAGTTTAAGGATGCTATATATATATATAACATACATTCAAAAGGAATATATATAAGTCAAACTACAA
TCTTTTTTCAATACAGCTTGCAGGTTTTGTATTATTCGAACTCTTCAGTTTTCTTAAAGTATTCATGTTCGATATTTGTTTACAGGG
ATACTGCAAAATATCCTCCCTTGATGAAAACAAGCAAACTTAGCAACTCACTCAAATACTTAACTCAAGCATATTTGGGGTAAGTA
TCTATAGATCAACCATTTCTCCCCTATACGATCGGTATCCGATCGATGATCGTTAACGAGAGAGTGATGCATCATGTTGGGTGTG
AATTAGGTATGACATTCAAAATGGCATTCAAGATCCTTATGAGGATTGTGTTGCAACAATGAGGCTTTACGTTAGGATGAGGAGA
CAAGTTCATAGGAGACAAGACTATCCGTTGGCTTCCGACCCTCAAAACCGGAACAACTTCGCGTCGTGGAGGCAAAACGAGCT
CGAGAGGATGTCCCCTGAAGAAATGTTGGCAATCTCAAGGTCTGATTACTACTGTTGGTGCTTGGATTCTGCGTAA
SEQIDNO: 226
KKCAACFREFNKMEHLVDHMRTSYHSLHEPTCVLCNKHCRSFDSLREHLIGPLPKQECNKLFKILGCKFCLSILESPHALKLHQHRCR
FSGVNYGTMSRPANKSTTVVDNGFSSHVVALACQMVDGGGNNESMDGCARVCMVDEYENIIFHVYVKPPISVPNYRYENSGIGGEH
LRDGMPLKQVQRRIEEFLCNGEAMWKIRSPKAGKARILVGHHLHPLLQSLHLQYPSFMIRDTAAYPPLMKTNKLSNSLKYLTQTYLGY
DIQAGVQDPYEDCVATMRLYLRMRNQVHQREDYPQASDPRNRNNFAPSRQSELERMSPEAMLAISRSDYYCWCLDSM
SEQIDNO: 227
GCATTCGGTATTCTTTCCATCTTACTCCTTCACACACACACCATCCTATGCACATTTATGTCACTTCGACTCTTTATTTTTCTAATG
GGATAAACTAGCATTTAGTTCTTGAATTTGATAAATTTTACCAATTTGATCCTTGAATGTTTTTTGTCCACATTAGTCTTTGAATTTG
ACAACTTTTCTTAATTTTAGTCTATGCGATTACGCGGCACTCTGAGAGCGTTGCATTATCACATGGAGCAAAATTGAGAAAATTT
GTCAAGTTCTAGAACTAATGTGACCACAACAAAATTCAAGGACTTTTTTTTTTTTTAAATGTCAACTTTAGAGACTAAATGTTGTTT
TGTCCTATATTAAATACATTCATGTTTAACAATTAGATTCGATACATATTGTTTAATTTTCTTTTAAAAAAAAGAAGAAAGACAACAA
ATTAGGTTAAAACTATTGTAAATTAAAGCCCTCGAGGTAGTTTACTTTTGTTAAACAAACCCATATACTTTTACTTTACTCAAACAA
GTCCCTATCCTTTGATTTGTAGTTTAGCCCTTATTTTAATAAAAAAATATTAACATATGGAGTGTTTGGAAGTGAAGGAAGAAATG
CGCAGCATGTTTCAGAGAGTTCAACAAAATGGAGCATTTGGTTGATCACATGAGAACTTCATATCATTCACTTCATGAACCTACC
TGTGTACTTTGTAATAAACACTGCAGGTCCTTTGATTCTCTAAGGGAACATCTTATAGGTCCTTTACCGAAACAAGAATGCAATAA
ATTATTCAAAATCCTAGGATGCAAATTCTGCTTATCGATTCTCGAAAGCCCTCACGCTCTTAAGCTTCACCAACACCGATGCCGC
TTCTCCGGAGTAAATTATGGAACAATGTCTCGACCGGCGAATAAGTCTACTACTGTTGTGGACAATGGGTTTTCGTCGCATGTG
GTTGCACTGGCTTGCCAAATGGTGGATGGTGGTGGGAACAATGAGTCAATGGATGGTTGTGCTAGGGTTTGCATGGTTGACGA
ATACGAGAATATCATCTTCCATGTTTATGTGAAACCACCTATTTCAGTTCCAAATTATAGGTATGAAAACAGTGGCATTGGAGGC
GAACATTTGAGAGATGGAATGCCATTGAAACAAGTGCAAAGAAGGATCGAAGAGTTTCTTTGCAATGGAGAAGCAATGTGGAAA
ATTCGATCACCTAAAGCTGGAAAAGCTAGGATTCTTGTGGGTCATCATCTTCATCCTCTTCTTCAATCCCTGCATTTACAATATCC
ATCATTTATGATAAGGGATACTGCAGCATATCCACCTTTAATGAAAACAAACAAACTTAGCAACTCACTCAAGTACTTGACTCAAA
CATATTTGGGATATGATATACAAGCTGGCGTTCAAGACCCTTATGAAGACTGTGTTGCAACAATGAGGCTTTACCTGAGGATGA
GGAACCAAGTTCACCAGAGAGAAGACTATCCACAGGCTTCTGACCCTCGAAATCGGAACAACTTTGCACCATCAAGGCAAAGC
GAGCTTGAGAGAATGTCTCCGGAAGCAATGCTGGCTATCTCGAGGTCTGATTACTACTGTTGGTGCTTAGATTCCATGTAA
SEQIDNO: 228
AAGAAATGCGCAGCATGTTTCAGAGAGTTCAACAAAATGGAGCATTTGGTTGATCACATGAGAACTTCATATCATTCACTTCATG
AACCTACCTGTGTACTTTGTAATAAACACTGCAGGTCCTTTGATTCTCTAAGGGAACATCTTATAGGTATGTCTTCAACACTGGTT
AGTCTATTTTGTTTTAATTTTTTTGGGGTCCTTGAGCCGTGAAATCTGTTCACCTCAATATCTGAAAAAGTTTAGATAAAAATATTA
GACTTGAATTAAAATATGAGCTATACTTAAGCTCCATTATCTAACACTCAAGCTTAACCTAGTTCAATCTGTTCTCGATTTTAAAAA
TCAGTTAAACTCTGCTATTAGTCTTTGTACTTTTTGCGAAAGTTGTGAATTTTGTCCTTGTACTTTAAATTGATCAATTTTAGTCCC
TTTACTTCTAAAATTTTAGGCTTGACCCAAACAATAACAGTTAAATTTGTTTGGTTAGATTCAACTACTAATCAAGTACTATGCATA
CAGTAGTAGCGTTAATCAATATTCTCTAATTAGATCATTCTATGTCTCTATACTTTTTCAAAACTTGGAATTTTAGTCTCCAGACAT
GATAGTCACTAATTCATTAACCGCATTTTTAGTGAGTAATGTATGGAAATAATAAGCTGACATAGCATTATATACTCAACTTAATG
AACTTAACAATTATTGTTTAGTGAAAACTAAAATTTTAAAATTCGAAAAGTATAAGAACTAAAAATACTAAATTAAAATACAAGGAC
TAATAGTAAAATTTAACCTTATAAATTTAAAAAAATGAAAGTATATAAAAATACTAAATATTAAATATAATTTTTTTTAAAATTGATAG
ATTTAAATTAATTTGGGTTAATCATTAACAAATATGAATGAGTTTAGATAAAATTGATATTTTTATTTCAAATTAGACCTATTCGAAA
TCCAAACTACCCGCATATAGTCTCACCTAAAATTTGATAGGGTTAAGACAAAAATAGTAGGCATCAAAAAATGAACTTGGCATTG
GTATGAATCTTGATTTCAATGCAAGAGGATCTGAGTTCGAGCATATATGATTTAAAACCTATGATTTGATAAATTGTAGGTCCTTT
ACCGAAACAAGAATGCAATAAATTATTCAAAATCCTAGGATGCAAATTCTGCTTATCGATTCTCGAAAGCCCTCACGCTCTTAAG
CTTCACCAACACCGATGCCGCTTCTCCGGAGTAAATTATGTATTCATCTAATTTAGCTTTGAAAAAAAATTATTTCAAACTACAAT
GCTGAAATTTAGCTTAATTAAAATGCAGTTTTGGTGGACGTCTTATTACAGGGAACAATGTCTCGACCGGCGAATAAGTCTACTA
CTGTTGTGGACAATGGGTTTTCGTCGCATGTGGTTGCACTGGCTTGCCAAATGGTGGATGGTGGTGGGAACAATGAGTCAATG
GATGGTTGTGCTAGGGTTTGCATGGTTGACGAATACGAGAATATCATCTTCCATGTTTATGTGAAACCACCTATTTCAGTTCCAA
ATTATAGGTACCAACCACACAATTCGTGATCTTATAAAATTATGTCAATTACTATTTACGTGTGATTTTTTTATATAATATATTTTAG
TTTTTTTATTAATTTAAAATTAAAATATTTATTTTTATTATAATCAATTAAAGATTAAATAAAAAAAATTTCAATCAGCCAACAAACTC
TTGACCTAGTGGCTAGAACATTATGTTGTAGGCATGAGAACTTAAATTTTATCTTCAGAGTTTTAGTTGCATATCTCAATATCGCT
TTGACCCAAACGGTACTACACTGAAACTGTAAAATAAATAATGGGTACAGGACTTACCTTTTTAAAAATAGTAAAGTTGGAAGTAT
TTTTTTTAACTCAATAATAAAATTGAATGGAATTCAATAGAAATCAAATTCAACATTATAATTTAATTGACTTTTTATTTTCTCGAATT
TGTTAGCTCTAATGTCTAATGAAAGGAAATATAAAACAATAATTCACATAATTGAACTACGTGTTTTTTTTAGGTATGAAAACAGTG
GCATTGGAGGCGAACATTTGAGAGATGGAATGCCATTGAAACAAGTGCAAAGAAGGATCGAAGAGTTTCTTTGCAATGGAGAAG
CAATGTGGAAAATTCGATCACCTAAAGCTGGAAAAGCTAGGATTCTTGTGGGTCATCATCTTCATCCTCTTCTTCAATCCCTGCA
TTTACAATATCCATCATTTATGATAAGGTAAAGTTTACCATCACATTCATTACAATATACAAAATTTATATGATGTGATTTTATTATT
GCCTATAGGGATACTGCAGCATATCCACCTTTAATGAAAACAAACAAACTTAGCAACTCACTCAAGTACTTGACTCAAACATATTT
GGGGTAAGTGTATATATATTGTCCCTCAATCCCTATGATCATATCATTGATTGTTGACCCTTGTGTATATATGTATATATATCAGAT
ATGATATACAAGCTGGCGTTCAAGACCCTTATGAAGACTGTGTTGCAACAATGAGGCTTTACCTGAGGATGAGGAACCAAGTTC
ACCAGAGAGAAGACTATCCACAGGCTTCTGACCCTCGAAATCGGAACAACTTTGCACCATCAAGGCAAAGCGAGCTTGAGAGA
ATGTCTCCGGAAGCAATGCTGGCTATCTCGAGGTCTGATTACTACTGTTGGTGCTTAGATTCCATGTAA
SEQIDNO: 229
MDSRRESAETLRNKCSACFRQYNKMEHLVEHMKVSYHSVHEPKCGACRKHCRSFESLREHLIGPLPKAECARVFSARGCSICLNIFD
SPATARYHRHTCQYSRAAPMPKGGAGGRAVAMACKMVGGGSDGSVDLCARVCLVGEDENIIFQTYVKPTAPVTNYRYEVTGIRPEY
LRDAMPLKLVQRRIQDILCNGEPLWKIRPRSYGRARILVGHIVDHDLERLGLEYPAFMIRDTAKYPPLMKTTKLSNTLKYLAQAYLGYD
VHTGIQDPYEDCVAAMRLYIRMRSQAHPRDYATGSGEVQNNYPAWRQRELERMSPEELLALSGSDYYCWCLDP
SEQIDNO: 230
ATTTGAGAGATCTTGATCGACCTGCAGGAAGAATCTCCAGGAGCGCGATGGACAGCAGAAGGGAGTCCGCGGAGACCTTGAG
GAACAAGTGCTCGGCCTGCTTCCGGCAGTACAACAAGATGGAGCACCTTGTGGAGCACATGAAGGTGTCGTACCACTCGGTCC
ACGAGCCCAAGTGCGGCGCCTGCAGGAAGCACTGCCGCTCCTTCGAGTCCCTCAGGGAGCACCTCATCGGGCCGTTGCCCAA
GGCGGAATGTGCGCGTGTCTTCAGCGCCCGGGGCTGCAGCATCTGCCTCAACATCTTCGACAGCCCCGCCACCGCCAGATAT
CACCGTCACACCTGCCAGTACTCCCGCGCTGCTCCGATGCCAAAGGGTGGCGCAGGTGGACGCGCGGTCGCCATGGCCTGC
AAGATGGTCGGGGGAGGGAGCGACGGATCGGTGGACCTCTGCGCGAGAGTGTGCCTTGTTGGAGAAGATGAGAACATCATCT
TCCAGACCTATGTAAAACCCACGGCGCCCGTCACAAACTACAGGTATGAGGTGACTGGGATAAGGCCCGAGTACCTGCGGGA
CGCAATGCCACTGAAACTTGTGCAGAGGAGGATCCAGGACATCCTGTGCAACGGGGAGCCGCTGTGGAAGATACGGCCGAGG
AGCTATGGAAGGGCAAGGATCCTCGTCGGACATATCGTGGACCATGACCTTGAGCGCCTAGGTTTGGAGTACCCGGCATTCAT
GATCAGGGACACCGCAAAGTACCCGCCCCTGATGAAAACCACCAAGCTGAGCAACACCCTGAAGTACCTCGCACAAGCATATC
TTGGATATGATGTCCATACTGGCATTCAGGATCCATATGAGGATTGCGTCGCGGCGATGCGACTATATATCAGGATGAGATCAC
AAGCTCACCCGCGAGACTACGCCACCGGTTCAGGGGAGGTGCAGAATAACTATCCGGCCTGGAGGCAGAGGGAGCTGGAGA
GGATGAGCCCGGAAGAACTCCTGGCACTTTCAGGATCAGACTACTACTGCTGGTGCCTGGACCCCTAGACGGATGAGCTGAAG
AGAACAAGGCCCGGCCGGCCGACCGATGCTGGTTCGGTCATACTCCATCCGTAGTAATAAGGACTACGTATGTCTAATTATCTT
TGGACTTATATATGTATGGTGGGATTGAGTATAATATTGGTGATCAAGAGTTGTATGAGTCGTATTTAAGAGCAATGATATATAGT
AAGA
SEQIDNO: 231
ATTTGAGAGATCTTGATCGACCTGCAGGAAGAATCTCCAGGAGCGCGATGGACAGCAGAAGGGAGTCCGCGGAGACCTTGAG
GTATGAAGACGTTGAGAAACGCCATTTTTCCTTACCATAGCTAGTGACCTGCTAACATACAGCAGTAGCCGGTAGGGTTGCCTA
GCTCGAAGGAAGGGTGCCAGGAGAGATGATGGACGCTTGCCTGACTGAAGCATGTGTGTGTGTGTACCAGGAACAAGTGCTC
GGCCTGCTTCCGGCAGTACAACAAGATGGAGCACCTTGTGGAGCACATGAAGGTGTCGTACCACTCGGTCCACGAGCCCAAG
TGCGGCGCCTGCAGGAAGCACTGCCGCTCCTTCGAGTCCCTCAGGGAGCACCTCATCGGTAAGCTACCAGCAAACTCAACCA
CTACCATATCTCTAGCTATGGCATCCTCCGTCTATGTCTTGGGCTGAACAGCTGAACTGAACACGCCGCTCCTTGTGATCCTGG
CAATGAAGGGCCGTTGCCCAAGGCGGAATGTGCGCGTGTCTTCAGCGCCCGGGGCTGCAGCATCTGCCTCAACATCTTCGAC
AGCCCCGCCACCGCCAGATATCACCGTCACACCTGCCAGTACTCCCGCGCTGCTCCGGTAATTAGTGTTCTCCTTCTCCACTC
CCTTCAGTCGCCGCCATCGAGCTCTACGTGGCTTGGATGCTAGAGCTCCCGGCCAACTTTTTACAGAAATGTTGTTGGGAGAAC
AGAAATCAGAATCTGATGTTTCTCTTCTTTTTTCTCAGATGCCAAAGGGTGGCGCAGGTGGACGCGCGGTCGCCATGGCCTGCA
AGATGGTCGGGGGAGGGAGCGACGGATCGGTGGACCTCTGCGCGAGAGTGTGCCTTGTTGGAGAAGATGAGAACATCATCTT
CCAGACCTATGTAAAACCCACGGCGCCCGTCACAAACTACAGGTAGCCTACGTACCTTGGGACTCACTACTGCTCTTGCTTACT
AGCTTGACAAGATCAACTAGATGGATTGTTTTCTGAAGCGCAAAAGATCAAGCTGACCATTTGGCTCTTCAGGTATGAGGTGAC
TGGGATAAGGCCCGAGTACCTGCGGGACGCAATGCCACTGAAACTTGTGCAGAGGAGGATCCAGGACATCCTGTGCAACGGG
GAGCCGCTGTGGAAGATACGGCCGAGGAGCTATGGAAGGGCAAGGATCCTCGTCGGACATATCGTGGACCATGACCTTGAGC
GCCTAGGTTTGGAGTACCCGGCATTCATGATCAGGTACAGATCTTTGCTCCGCGAGCTACAGCTTGTTCCTACTATCTCTTCGT
GAATTCCCTCGAAATTTACTACTATTTTCTTAACACAATTTATCTATGGACGTGCAGGGACACCGCAAAGTACCCGCCCCTGATG
AAAACCACCAAGCTGAGCAACACCCTGAAGTACCTCGCACAAGCATATCTTGGGTATGTCACTTGATAACTGAGGATTACAACA
AACTCTCAGAATTTTTCTGGTATTTTGCATAATCCTCAAGAGGTTGTCCTTCTATCGCGTTGTAGATATGATGTCCATACTGGCAT
TCAGGATCCATATGAGGATTGCGTCGCGGCGATGCGACTATATATCAGGATGAGATCACAAGCTCACCCGCGAGACTACGCCA
CCGGTTCAGGGGAGGTGCAGAATAACTATCCGGCCTGGAGGCAGAGGGAGCTGGAGAGGATGAGCCCGGAAGAACTCCTGG
CACTTTCAGGATCAGACTACTACTGCTGGTGCCTGGACCCCTAGACGGATGAGCTGAAGAGAACAAGGCCCGGCCGGCCGAC
CGATGCTGGTTCGGTCATACTCCATCCGTAGTAATAAGGACTACGTATGTCTAATTATCTTTGGACTTATATATGTATGGTGGGA
TTGAGTATAATATTGGTGATCAAGAGTTGTATGAGTCGTATTTAAGAGCAATGATATATAGTAAGA
SEQIDNO: 232
MDSSSDAHSRNKCAACYRQFNRMEHLVEHMRASHHSPHEPRCGVCGKHCRSLDALRDHLGFGASLPPKPACARAFAAQGCPLCL
AVFPSAGSLRAHSPTCHLSRAPVPSMPMPRTPVGGAVALGCKMVGAGNDGTLDVCARVCVIDEHEAIVYEKFVRPLLPVTHYRYETT
GIRPEHLRDALAVKMVQRQVEDILLNGEQPWKVRSSRGAARLLVGHGLEHDLDALGMDYPAYLKRDTAVYPPLMKTSARLMSNSLR
FLTQSCLGYDIQTGHQHPYEDCVAAMRLYKKMRAMRHGRPNNVGDGDGCAAKPFPTWRQRELERMSPEELLSMSKPDYHCWCLD
N
SEQIDNO: 233
ATCATGGATAGCTCTTCAGATGCCCACAGCCGGAACAAGTGTGCGGCGTGCTACCGTCAGTTCAACAGGATGGAGCACCTGGT
GGAGCACATGCGCGCGTCGCACCACTCGCCACACGAGCCGCGCTGCGGCGTCTGCGGGAAGCACTGCCGCTCCCTCGACGC
CCTCCGTGACCACCTCGGCTTCGGCGCCTCCCTCCCCCCAAAGCCCGCCTGCGCCAGGGCCTTCGCCGCCCAGGGCTGCCC
GCTCTGCCTCGCCGTCTTCCCTAGCGCCGGCTCCCTCCGCGCCCACAGCCCCACCTGTCACCTCTCTCGTGCTCCGGTTCCCT
CGATGCCTATGCCAAGAACGCCCGTCGGCGGTGCGGTGGCGCTGGGGTGCAAAATGGTGGGCGCCGGCAACGACGGGACG
CTGGACGTGTGCGCGCGCGTCTGCGTCATCGACGAGCACGAGGCCATCGTCTACGAGAAGTTCGTGAGGCCGCTCCTCCCGG
TGACGCACTACCGGTACGAGACCACGGGGATCCGCCCCGAGCACCTTCGGGACGCGCTGGCGGTGAAGATGGTCCAGCGGC
AGGTGGAGGACATCCTCCTCAACGGCGAGCAGCCATGGAAGGTCCGGTCCTCCCGCGGCGCGGCCAGGCTCCTCGTCGGGC
ACGGCCTGGAGCACGATCTCGACGCGCTGGGCATGGACTATCCGGCGTACCTGAAGCGGGACACGGCGGTATACCCGCCGC
TGATGAAGACGAGCGCCAGGCTGATGAGCAACTCGCTCCGGTTCCTCACTCAGAGCTGCCTCGGCTATGACATCCAGACGGG
CCACCAGCATCCCTACGAGGACTGCGTGGCGGCCATGCGGCTGTACAAGAAGATGCGCGCGATGAGGCACGGCCGGCCCAA
CAACGTCGGAGACGGCGATGGGTGCGCCGCGAAGCCATTCCCGACGTGGAGGCAGCGGGAGCTGGAGCGCATGTCGCCGG
AGGAGCTCCTCAGCATGTCCAAGCCCGACTACCACTGCTGGTGCCTCGACAACTAGCTAGCCACGGCTTGCCTACAGAATTCG
ATTCTTCGCTCTTTACATACTTATATACTAGCACCGTACGTTGCAACGAAAGAAAAAATACGCATAATCCAAACTAAATAACTA
SEQIDNO: 234
ATCATGGATAGCTCTTCAGATGCCCACAGGTGCACACACTGTCCACTGCTCCGTTTGAGTTGTTACACATTTTGCAGTGGAAGA
ACTCTACTGTATACTCTGCAGTATTTCTCGAAAGTTTTGTGAGATCATGCCACGAAATTAAGTTATCTGCACACTTTGTTTGTTTC
TACATTACGTGATAAGTTGAGGTTGATTCTTAAGAATCTTATAATTGTTTTCTTAAGAATCTAGTATTCGTCGTCTGCATGCAGCC
GGAACAAGTGTGCGGCGTGCTACCGTCAGTTCAACAGGATGGAGCACCTGGTGGAGCACATGCGCGCGTCGCACCACTCGCC
ACACGAGCCGCGCTGCGGCGTCTGCGGGAAGCACTGCCGCTCCCTCGACGCCCTCCGTGACCACCTCGGCTTCGGCGCCTC
CCTCCCCCCAAAGCCCGCCTGCGCCAGGGCCTTCGCCGCCCAGGGCTGCCCGCTCTGCCTCGCCGTCTTCCCTAGCGCCGG
CTCCCTCCGCGCCCACAGCCCCACCTGTCACCTCTCTCGTGCTCCGGTTCCCTCGATGCCTATGCCAAGAACGCCCGTCGGC
GGTGCGGTGGCGCTGGGGTGCAAAATGGTGGGCGCCGGCAACGACGGGACGCTGGACGTGTGCGCGCGCGTCTGCGTCAT
CGACGAGCACGAGGCCATCGTCTACGAGAAGTTCGTGAGGCCGCTCCTCCCGGTGACGCACTACCGGTACGAGACCACGGG
GATCCGCCCCGAGCACCTTCGGGACGCGCTGGCGGTGAAGATGGTCCAGCGGCAGGTGGAGGACATCCTCCTCAACGGCGA
GCAGCCATGGAAGGTCCGGTCCTCCCGCGGCGCGGCCAGGCTCCTCGTCGGGCACGGCCTGGAGCACGATCTCGACGCGCT
GGGCATGGACTATCCGGCGTACCTGAAGCGGGACACGGCGGTATACCCGCCGCTGATGAAGACGAGCGCCAGGCTGATGAG
CAACTCGCTCCGGTTCCTCACTCAGAGCTGCCTCGGCTATGACATCCAGACGGGCCACCAGCATCCCTACGAGGACTGCGTG
GCGGCCATGCGGCTGTACAAGAAGATGCGCGCGATGAGGCACGGCCGGCCCAACAACGTCGGAGACGGCGATGGGTGCGCC
GCGAAGCCATTCCCGACGTGGAGGCAGCGGGAGCTGGAGCGCATGTCGCCGGAGGAGCTCCTCAGCATGTCCAAGCCCGAC
TACCACTGCTGGTGCCTCGACAACTAGCTAGCCACGGCTTGCCTACAGAATTCGATTCTTCGCTCTTTACATACTTATATACTAG
CACCGTACGTTGCAACGAAAGAAAAAATACGCATAATCCAAACTAAATAACTA
SEQIDNO: 235
MMMGRRESSETLRNKCAACYRQYNRMEHLVEHMKVNYHSVHEPRCGVCGKHCRSFESLREHLIGPLPKVECARVFSVRGCSICLNI
FDSNAAVRYHRAACQYTRAAPMPRGGITGRAVALACKMVGGGSDGSVDLCARVCLIGEDENIIFQTYVKPTAPVTNYRYEVTGVRPE
YLRDAMPLKVAQRRIQEILCNGEPLWKLRPRSYGRAKILVGHGLEHDLERLGLEYPAFMIRDTAKYPPLLKTSKLSNSLKYLTQAYLGY
DIQTGIQDPYEDCVAAMRLYIRMRSQAHPRDYNSGSGEAQNNYPAWRQRELERMSPEELLALSASDYYCWCLDY
SEQIDNO: 236
CTCGAGCTCGATCTCTTCTCAGGGACCTTTGACCCAAGTGTTGGAATCTGAGAATGATGATGGGCAGGAGGGAGTCCTCGGAG
ACCTTGAGGAACAAATGCGCGGCCTGCTACAGGCAGTACAACAGGATGGAGCACCTGGTGGAGCACATGAAGGTGAACTACC
ACTCGGTGCACGAGCCCAGGTGCGGCGTCTGCGGCAAGCACTGCCGCTCCTTCGAGTCGCTCAGGGAGCATCTGATCGGGC
CATTGCCCAAGGTGGAGTGCGCGCGGGTTTTCAGCGTCCGCGGCTGCAGCATCTGCCTCAACATCTTCGACAGCAACGCCGC
CGTCAGATACCACCGTGCAGCCTGCCAATACACTCGTGCTGCTCCGATGCCCAGGGGTGGCATAACTGGCCGTGCGGTTGCT
CTGGCTTGTAAAATGGTTGGAGGAGGGAGTGACGGCTCAGTGGACCTTTGTGCAAGGGTGTGCCTCATTGGAGAAGACGAGA
ATATCATCTTCCAGACCTATGTCAAACCTACAGCTCCAGTCACCAACTACAGGTATGAAGTAACTGGGGTAAGGCCAGAGTACT
TGAGGGACGCAATGCCACTGAAGGTTGCACAGAGGAGGATCCAGGAGATCTTGTGCAACGGGGAGCCGCTGTGGAAGTTACG
CCCAAGGAGTTATGGAAGGGCAAAGATCCTGGTTGGCCATGGCCTGGAACATGATCTTGAGCGCCTAGGGTTGGAGTACCCC
GCATTCATGATCAGGGACACTGCAAAATACCCGCCTCTGTTGAAGACTAGCAAACTGAGTAACTCCCTGAAGTATCTTACACAA
GCATATCTTGGGTATGATATTCAAACAGGCATTCAGGATCCCTATGAGGACTGTGTGGCAGCAATGAGGCTGTACATCAGGATG
AGATCACAGGCTCACCCGAGAGATTATAACTCCGGTTCAGGTGAGGCCCAGAACAACTACCCAGCCTGGAGGCAGAGAGAACT
GGAGAGGATGAGCCCAGAAGAACTGCTGGCACTTTCAGCATCAGACTATTATTGCTGGTGCCTGGATTACTAAATTGATCGGCT
ATAAAGCGAATAAGGCAGGCCAACATTGTTGGTCCATTCATATTCCGTCTACGGCAATAATTTTAGATGTACAAATAGCTTGCGG
CTTGACTATACTGGGGTTAATTATAACATATATACATGTAACGCTTTCATATAAATATTGGTGATTTAGAGCTGTAAGAAGTGATA
TTATCTTAATGATATTATATGGCAAGAGGGTTTTTTTACCTTGCTTTATGAATCCAGAAAATGAGAAAACCAGAAGTACATCAACT
ATACGCCAAAGGCAGATAAAAAGGACATTTATCTACATGTAACGAATGGACGATTGTACATTCTGTGCAGCGTGTCAGACTATCT
CAGTGCTATACAAGTATATCTACATTAGCCTGCAGTAGACCATACCTGTGCGAAATGAAGATTCAAGTTTCTGAGCTGTTGAAGA
AGAGCCTTACACTGGAGTCATTGAATTTCCGGCATTGCTTAGCTTCTGCGGGTGGATTCTTAGGTTTGGGCTCGTCCGGTTTTG
CCTGCTTGTCACCCTTGTCCTTGGATTGGCTCCTATTTAGCTTGATGAACTCAAGACACTGTCGAATGATTGTCAGCACCGTGAA
ATGTGTCTCAAAGTCATTCTTGATGACAGGTGGATGGTGGAGGTTGGGCCCATTGTTGCTCCAGGTGTAGTTCTCGATGAAGTA
AACACAATCAGTTCGGGCCCTGAACGAAACCTCCCGTAGTAGCTCTTCAGCCTGCCTAATTGATCTCATGGCCTTCTTAAAAGT
CAATACAACGATCAAATTAAGC
SEQIDNO: 237
CTCGAGCTCGATCTCTTCTCAGGGACCTTTGACCCAAGTGTTGGAATCTGAGAATGATGATGGGCAGGAGGGAGTCCTCGGAG
ACCTTGAGGTAAGATGATAAGAGATGCTATTCTTTCTTTCAGCTTTCAGCATTGATATGCGCGCTTCGATGAACATGCACTCCAG
GCTCAAGTTCATCCCACACTGCACCTAACCCTTATAGAGATGTAGGCATATATGCAGAAACCATCAAGGCACCTCAACAATCAAT
CTAAGTCAATCTAAGGCTTGAAACATATCCATTATATTTACTGTAACCACGTGAAACCAGCCAGATTGCGGTTGCAGAACTATAC
AAGCCGCTGCTCCGAGTAATCTGGAAGTGTAGCTAGATTAATCTATGCATCAAAGTAACTGAAGCATGTGCATGTATGTCTCCC
ATGATCAGGAACAAATGCGCGGCCTGCTACAGGCAGTACAACAGGATGGAGCACCTGGTGGAGCACATGAAGGTGAACTACC
ACTCGGTGCACGAGCCCAGGTGCGGCGTCTGCGGCAAGCACTGCCGCTCCTTCGAGTCGCTCAGGGAGCATCTGATCGGTAC
GCAGAAAACTGAGAACCAAGGACAGCAGCTCACAGCTGAACGATCGTGGTTTCTGACGCTGCCTCTTCTCAATCTTTAGGGCC
ATTGCCCAAGGTGGAGTGCGCGCGGGTTTTCAGCGTCCGCGGCTGCAGCATCTGCCTCAACATCTTCGACAGCAACGCCGCC
GTCAGATACCACCGTGCAGCCTGCCAATACACTCGTGCTGCTCCGGTAATGATTTACTGATTTCTACTCTATTCATTCATATTAC
CATATATTCAGTTCATTTCAGAACTCAGATGCATAGACATCCCTTTGTTGTGACTTTGGTTGATGCTAGATTCTAACATTTTTCTTC
CTTTCCATCTGGTCCCAGATGCCCAGGGGTGGCATAACTGGCCGTGCGGTTGCTCTGGCTTGTAAAATGGTTGGAGGAGGGAG
TGACGGCTCAGTGGACCTTTGTGCAAGGGTGTGCCTCATTGGAGAAGACGAGAATATCATCTTCCAGACCTATGTCAAACCTAC
AGCTCCAGTCACCAACTACAGGTAACATTTCATTCCATTACTTTTCCTGCATACCAGTAGTCTCCCATTTGTAATAGATGGTACAA
GAGAAATTATCAAACCAGCGAAAAAAACCAGAAAGAAAGCATTAGCGATCATTGAGTGGACACTATGCTGGAAACTGGACAGGA
GATTTGCATGGACCACTTTCTAAAATGAGACGAGCTGATTATTTGTGTGTTCAGGTATGAAGTAACTGGGGTAAGGCCAGAGTA
CTTGAGGGACGCAATGCCACTGAAGGTTGCACAGAGGAGGATCCAGGAGATCTTGTGCAACGGGGAGCCGCTGTGGAAGTTA
CGCCCAAGGAGTTATGGAAGGGCAAAGATCCTGGTTGGCCATGGCCTGGAACATGATCTTGAGCGCCTAGGGTTGGAGTACC
CCGCATTCATGATCAGGTGAGGAGAACTAGATAACTAAGTGGGTTGTAGTCTATCTGCTTTCTAACATATATAGATCTTGCTTAC
CTAGCTATGGTTTAGGAATCCAGAGTCAAAGTTGCTACGGTTTCTAACATTGACGCATGTGCAGGGACACTGCAAAATACCCGC
CTCTGTTGAAGACTAGCAAACTGAGTAACTCCCTGAAGTATCTTACACAAGCATATCTTGGGTATGTCACTAGCAGGCTATTCTA
AACAATCAGCCTACTACTTAGTATCTCCGTAATGCTAAATAGATTGTTTTTGCATCTTATTGTAGGTATGATATTCAAACAGGCATT
CAGGATCCCTATGAGGACTGTGTGGCAGCAATGAGGCTGTACATCAGGATGAGATCACAGGCTCACCCGAGAGATTATAACTC
CGGTTCAGGTGAGGCCCAGAACAACTACCCAGCCTGGAGGCAGAGAGAACTGGAGAGGATGAGCCCAGAAGAACTGCTGGCA
CTTTCAGCATCAGACTATTATTGCTGGTGCCTGGATTACTAAATTGATCGGCTATAAAGCGAATAAGGCAGGCCAACATTGTTGG
TCCATTCATATTCCGTCTACGGCAATAATTTTAGATGTACAAATAGCTTGCGGCTTGACTATACTGGGGTTAATTATAACATATAT
ACATGTAACGCTTTCATATAAATATTGGTGATTTAGAGCTGTAAGAAGTGATATTATCTTAATGATATTATATGGCAAGAGGGTTT
TTTTACCTTGCTTTATGAATCCAGAAAATGAGAAAACCAGAAGTACATCAACTATACGCCAAAGGCAGATAAAAAGGACATTTAT
CTACATGTAACGAATGGACGATTGTACATTCTGTGCAGCGTGTCAGACTATCTCAGTGCTATACAAGTATATCTACATTAGCCTG
CAGTAGACCATACCTGTGCGAAATGAAGATTCAAGTTTCTGAGCTGTTGAAGAAGAGCCTTACACTGGAGTCATTGAATTTCCG
GCATTGCTTAGCTTCTGCGGGTGGATTCTTAGGTTTGGGCTCGTCCGGTTTTGCCTGCTTGTCACCCTTGTCCTTGGATTGGCT
CCTATTTAGCTTGATGAACTCAAGACACTGTCGAATGATTGTCAGCACCGTGAAATGTGTCTCAAAGTCATTCTTGATGACAGGT
GGATGGTGGAGGTTGGGCCCATTGTTGCTCCAGGTGTAGTTCTCGATGAAGTAAACACAATCAGTTCGGGCCCTGAACGAAAC
CTCCCGTAGTAGCTCTTCAGCCTGCCTAATTGATCTCATGGCCTTCTTAAAAGTCAATACAACGATCAAATTAAGC
SEQIDNO: 238
MDSSSDAHGRHRCAACFRQFNKMEHLVEHMRAARHSAHEPRCGLCGKHCRSFEALRDHLGVGGSTLPKATACADAFAARGCAICL
RVTPHHRASCTLARTPRTPQAAAPPQGGGSGRALALGCKMVGAGSDGSLDVVARVCVVDEQENIVYEAFVKPLIPVTHYRYETTGIR
PENLRDGGGAVTVKAAQRRVQDLLLAGEQPWKVRTSRGRARLLVGHGLDHDLDALGMDYPAYLKRDTAAYPPLMKTSKLSNSLRFL
TRTYLGYEIQTGHQHPYEDCVAAMRLYRRMKEQGHTRRGGDADEPAASADQAFPAWRQRELERMTPEELLRLSTPDYRCWCLDD
SEQIDNO: 239
CCCGTGCGCAGCCTTCGCCGCGACAGCTCGACCGACACCAATCGACAGGTTCAGTGAGCTGTGCTAGTGACGAACTGACTGA
ACTGACTGACGATGGATAGCTCCTCTGATGCTCATGGGCGTCACAGGTGCGCGGCGTGCTTCCGGCAGTTCAACAAGATGGA
GCACCTGGTGGAGCACATGCGGGCGGCGCGGCACTCGGCGCACGAGCCCCGCTGCGGCCTCTGCGGCAAGCACTGCCGCT
CCTTCGAGGCGCTCCGCGATCACCTCGGCGTCGGCGGCTCCACGCTGCCCAAGGCCACCGCCTGCGCCGACGCCTTCGCCG
CGCGCGGCTGCGCCATCTGCCTCCGCGTCACGCCCCACCACCGCGCCTCCTGCACGCTCGCGCGCACCCCCAGGACGCCGC
AGGCGGCGGCGCCGCCCCAGGGAGGAGGAAGTGGGCGGGCGCTGGCGCTGGGCTGCAAGATGGTCGGTGCCGGCAGCGA
CGGCTCCCTGGACGTGGTGGCGCGGGTGTGCGTCGTCGACGAGCAGGAGAACATCGTGTACGAGGCCTTCGTGAAGCCGCT
CATCCCGGTGACGCACTACCGGTACGAGACGACGGGGATCCGGCCGGAGAACCTCCGCGACGGCGGCGGCGCCGTGACGG
TGAAGGCCGCGCAGCGGCGGGTGCAGGACCTGCTGCTCGCCGGCGAGCAGCCGTGGAAGGTGCGCACCAGCCGGGGCCGG
GCCAGGCTGCTGGTGGGCCATGGCCTGGACCACGACCTCGACGCGCTGGGGATGGACTACCCGGCCTACCTCAAGCGCGAC
ACGGCCGCGTACCCGCCGCTGATGAAGACGAGCAAGCTCAGCAACTCGCTCAGGTTCCTCACGCGCACCTACCTCGGGTACG
AGATCCAGACGGGGCACCAGCACCCCTACGAGGACTGCGTCGCCGCCATGCGCCTCTACCGCAGGATGAAGGAGCAGGGCC
ACACCAGGCGTGGCGGCGACGCCGACGAGCCGGCGGCCAGCGCGGACCAGGCGTTCCCGGCGTGGAGGCAGCGGGAGCT
GGAGCGCATGACGCCCGAGGAACTGCTCCGGCTCTCCACGCCGGACTACCGCTGCTGGTGCCTCGATGACTAG
SEQIDNO: 240
CCCGTGCGCAGCCTTCGCCGCGACAGCTCGACCGACACCAATCGACAGGTTCAGTGAGCTGTGCTAGTGACGAACTGACTGA
ACTGACTGACGATGGATAGCTCCTCTGATGCTCATGGGTGAGTTGCAACTTCTCTACTCTCTTCAGACCTCGCTGAAGGGTTCA
GCACTTCAGCATCACTTCAGTCTCTTTAGACGAAGGCAAGGCCCAAGGGGACATAACACTTGCATGCATGCTTTTGATGGCACA
ATTAGACAGCTTAAACATGCTTTAATTTGTAGTATAATATCTTATTCTAACCAACCCTTGAAAAATGTGATTGCGTTATGGCAGGC
GTCACAGGTGCGCGGCGTGCTTCCGGCAGTTCAACAAGATGGAGCACCTGGTGGAGCACATGCGGGGGGCGCGGCACTCGG
CGCACGAGCCCCGCTGCGGCCTCTGCGGCAAGCACTGCCGCTCCTTCGAGGCGCTCCGCGATCACCTCGGCGTCGGCGGCT
CCACGCTGCCCAAGGCCACCGCCTGCGCCGACGCCTTCGCCGCGCGCGGCTGCGCCATCTGCCTCCGCGTCACGCCCCACC
ACCGCGCCTCCTGCACGCTCGCGCGCACCCCCAGGACGCCGCAGGCGGCGGCGCCGCCCCAGGGAGGAGGAAGTGGGCG
GGCGCTGGCGCTGGGCTGCAAGATGGTCGGTGCCGGCAGCGACGGCTCCCTGGACGTGGTGGCGCGGGTGTGCGTCGTCG
ACGAGCAGGAGAACATCGTGTACGAGGCCTTCGTGAAGCCGCTCATCCCGGTGACGCACTACCGGTACGAGACGACGGGGAT
CCGGCCGGAGAACCTCCGCGACGGCGGCGGCGCCGTGACGGTGAAGGCCGCGCAGCGGGGGGTGCAGGACCTGCTGCTCG
CCGGCGAGCAGCCGTGGAAGGTGCGCACCAGCCGGGGCCGGGCCAGGCTGCTGGTGGGCCATGGCCTGGACCACGACCTC
GACGCGCTGGGGATGGACTACCCGGCCTACCTCAAGCGCGACACGGCCGCGTACCCGCCGCTGATGAAGACGAGCAAGCTC
AGCAACTCGCTCAGGTTCCTCACGCGCACCTACCTCGGGTACGAGATCCAGACGGGGCACCAGCACCCCTACGAGGACTGCG
TCGCCGCCATGCGCCTCTACCGCAGGATGAAGGAGCAGGGCCACACCAGGCGTGGCGGCGACGCCGACGAGCCGGCGGCC
AGCGCGGACCAGGCGTTCCCGGCGTGGAGGCAGCGGGAGCTGGAGCGCATGACGCCCGAGGAACTGCTCCGGCTCTCCAC
GCCGGACTACCGCTGCTGGTGCCTCGATGACTAG
SEQIDNO: 241
MVDSRRESSETLRNKCAACFRQYNRMEHLVEHMKVSYHSVHEPKCGVCRKHCRSFESLREHLIGPLPKVECARVFSVRGCSICLNIF
DSNATVRYHRAACQYSRAAPQMPRGGITGRAVALACKMVGGGSDGSMDLCAKVCLIGEDEHIIFQTYVKPILPVTNYRYEVTGIRPEY
LRDAMPLKVAQRRIQEILCNGEPLWKLRPRSYGRAKILVGHGLDHDLERLGLEYPAFMIRDTAKYPPLVKTSKLSNSLKYLTQAYLGY
DIHTGIQDPYEDCVAAMRLYIRMRSQAHPRDYNSGSGEAQNNYPAWRQRELERMSPEELLALSASDYYCWCLDY
SEQIDNO: 242
CGATCTTGGCCTCTCAGGGACCTTGACCGCCCAAGTCCCGAATTGTAGGAATCTGAGCGAGGGCTCATGGTGGACAGCAGGA
GGGAGTCCTCGGAGACCTTGAGGAACAAATGCGCAGCCTGCTTCAGGCAGTACAACAGGATGGAGCACCTGGTGGAGCACAT
GAAGGTCTCGTACCACTCGGTGCACGAGCCCAAGTGCGGCGTCTGCCGGAAGCACTGCCGCTCCTTCGAGTCGCTCAGGGAG
CATCTCATCGGGCCGTTGCCCAAGGTGGAGTGCGCGCGGGTCTTCAGCGTCCGCGGCTGCAGCATCTGCCTCAACATTTTCG
ACAGCAACGCCACCGTCAGATACCACCGTGCTGCCTGCCAATACTCTCGTGCTGCTCCGCAGATGCCCAGGGGTGGCATAACT
GGCCGTGCGGTTGCACTGGCTTGCAAAATGGTAGGGGGAGGGAGTGACGGCTCAATGGACCTTTGTGCAAAGGTGTGCCTCA
TTGGAGAAGATGAGCACATCATCTTCCAGACCTATGTCAAGCCTATACTTCCTGTAACCAACTACAGGTATGAAGTAACTGGGAT
AAGGCCAGAGTACTTGAGGGATGCAATGCCGCTTAAGGTTGCGCAGAGGAGAATCCAGGAAATCCTGTGCAACGGGGAGCCG
CTGTGGAAGTTACGCCCAAGGAGCTATGGGAGGGCAAAGATCCTTGTTGGTCATGGCCTGGACCATGACCTTGAGCGCCTAG
GGTTGGAGTACCCAGCATTCATGATTAGGGATACTGCGAAATACCCACCACTAGTGAAGACTAGCAAGCTGAGTAACTCCCTGA
AGTACCTTACACAAGCATACCTTGGGTATGATATACATACTGGCATTCAGGACCCCTACGAGGACTGCGTTGCAGCAATGAGGC
TGTACATCAGGATGAGATCACAAGCTCACCCGAGAGATTACAACTCCGGCTCTGGCGAGGCCCAGAACAACTACCCAGCCTGG
AGGCAGAGAGAGCTCGAGAGGATGAGCCCAGAAGAACTCCTGGCACTTTCAGCATCAGATTACTATTGCTGGTGCCTGGATTA
CTAAACTGATCGGCTATAAAGAAAATAAGGCAGGCCAACATTGTTGGTTCATCCATATTCCGTCTATGATAATAAATCTTTAGATG
TAGCTTGCGGCTTGACTATATATTTGGGTTAACTATGACGTATAAACAAAGGATTATGTATACATGTAATGATGCTTTCATATAAG
CTAGTATTGTTGTTTTAGATCTGTATAAGAAGTGATATTATGATTTATGAT
SEQIDNO: 243
CGATCTTGGCCTCTCAGGGACCTTGACCGCCCAAGTCCCGAATTGTAGGAATCTGAGCGAGGGCTCATGGTGGACAGCAGGA
GGGAGTCCTCGGAGACCTTGAGGTAAGATGATAAGAGACGATGCTATTCTTTCAGCTTTCATTGATATGCGTACTGCAAATGGC
CGTGCACTCATCAGACTGATTAAGTGCATGCACGCATGTCCATTTCTTGTTACTATGAGCCTGTCAGACTGCGGTTGCGAGAGC
TAGGCAGCTAGCGAGCTATGCTGTTCATGCATGAAACTGCTCGTGCAAGGATCATCAGCTAGTTTCAGTTCGCCTCCTGCATTC
GATCCTATATATGTTCCTGAAAGCTAGAATCCATGCATCATGATCACAAACACATATATACGAATGAATTCCCTCATGCATGTTAT
TTATGCCCCCCATGAATCATGATCATCAGGAACAAATGCGCAGCCTGCTTCAGGCAGTACAACAGGATGGAGCACCTGGTGGA
GCACATGAAGGTCTCGTACCACTCGGTGCACGAGCCCAAGTGCGGCGTCTGCCGGAAGCACTGCCGCTCCTTCGAGTCGCTC
AGGGAGCATCTCATCGGTATGCACAAATAAAGCTTTTGCTGACAAGAAAAAGACGGCAGCTTAATTAACTACATACAGCTGAACT
CAATTCTGACGACGCTTCTTGTTCTTCTTCTCCATCTTCCTTCAGGGCCGTTGCCCAAGGTGGAGTGCGCGCGGGTCTTCAGCG
TCCGCGGCTGCAGCATCTGCCTCAACATTTTCGACAGCAACGCCACCGTCAGATACCACCGTGCTGCCTGCCAATACTCTCGT
GCTGCTCCGGTAATCATATCGATCCATCTGTTGCTCTCTACCCTATTCATTATTCATCATATGCCGTATATATATTCAGTTGATCTT
CCCTCGTGAAGGGCTGAAGGCTTTGGTTGATATATACTAGATTCTAATGTTTTTTTTTCCACCCTCCTATATATGTGGTCCCAGCA
GATGCCCAGGGGTGGCATAACTGGCCGTGCGGTTGCACTGGCTTGCAAAATGGTAGGGGGAGGGAGTGACGGCTCAATGGA
CCTTTGTGCAAAGGTGTGCCTCATTGGAGAAGATGAGCACATCATCTTCCAGACCTATGTCAAGCCTATACTTCCTGTAACCAAC
TACAGGTAATCCTACTTCTCATGCAGTTGTCATGCATCATGTTACTAGTCTACTAGCAACTCTAGCTAGTCGATAGTTGAGGAGA
AATTGTGAGACCAGCAAAATCAGAAAGAAAGAATCGGCAATCTTTCAGGGTGTACCACTATATATATGCTTGAAACTTGAAACTC
TCGAGAGGACAGGGAAGATATCTGGATGGACTAATTTTGTGACGACACGAACTGATGACTATATGTAACATGTTTTTCAGGTATG
AAGTAACTGGGATAAGGCCAGAGTACTTGAGGGATGCAATGCCGCTTAAGGTTGCGCAGAGGAGAATCCAGGAAATCCTGTGC
AACGGGGAGCCGCTGTGGAAGTTACGCCCAAGGAGCTATGGGAGGGCAAAGATCCTTGTTGGTCATGGCCTGGACCATGACC
TTGAGCGCCTAGGGTTGGAGTACCCAGCATTCATGATTAGGTGAGAAGCAGAAAAAAAAATGTCACTGAATTTCTCTTTTCTTCA
TTCCTAACATTTATAGATCTTTGCTTGCTGAGCTATGGTTCAGGAATCAGCTACCACAGTTGTTTTGCCCTTTTTGACAGAAAAAA
TTGTTATGCATATGCAGGGATACTGCGAAATACCCACCACTAGTGAAGACTAGCAAGCTGAGTAACTCCCTGAAGTACCTTACA
CAAGCATACCTTGGGTATGTCACTTCTTGAATGATCTATGCAGTCAGCCTACTATTTCATATCTGCGTAATGATGCTAAGGAGAT
TGTATCCTCTTGTAGGTATGATATACATACTGGCATTCAGGACCCCTACGAGGACTGCGTTGCAGCAATGAGGCTGTACATCAG
GATGAGATCACAAGCTCACCCGAGAGATTACAACTCCGGCTCTGGCGAGGCCCAGAACAACTACCCAGCCTGGAGGCAGAGA
GAGCTCGAGAGGATGAGCCCAGAAGAACTCCTGGCACTTTCAGCATCAGATTACTATTGCTGGTGCCTGGATTACTAAACTGAT
CGGCTATAAAGAAAATAAGGCAGGCCAACATTGTTGGTTCATCCATATTCCGTCTATGATAATAAATCTTTAGATGTAGCTTGCG
GCTTGACTATATATTTGGGTTAACTATGACGTATAAACAAAGGATTATGTATACATGTAATGATGCTTTCATATAAGCTAGTATTGT
TGTTTTAGATCTGTATAAGAAGTGATATTATGATTTATGAT
SEQIDNO: 244
MDSASDAHGRHKCAACFRQFNKMEHLVEHMRAARHSSHEPRCDICRKHCRSFEALRDHLGVGGSTLPKAAYCADAFAARGCTICL
RVLASAAALGAHSAACRLSRIPPPMMSRALQHHQLPAATQPHGGGGEGGALALGCKMVGAGSDGSLDVCARVCVIDEQENILFEAF
VKPLLPVTHYRYETTGIRPEHLRDGASTTVKNAQRRVEELLLNGEQPWKVRTSRGRARLLVGHGLDHDLDALGMDYPGYLKRDTAT
YPPLMKTSKLSNSLRFLTHKYLGYDIQTGHQHPFEDCVAAMRLYRRMRGQQQHPRGGGGDADAPAAATADQAFPAWRQRELERM
TPEELLRLSTPDYRCWCLDA
SEQIDNO: 245
CACACACGGCAGAAAGCTTTGGTAAAGTGAGTGAGCGAGCGAGCAGCAGTGGCTGTCGCTCGCGATGATCATGAGTGTTCGAT
CATCACATAGTGACACAACAATGGCGACAGAGGATCTAGTTCCATCCTCCGGCCTAGTATAAATAGGCACCCGTGTTAAGGCTC
CTTGCTGACAGATCATCACATCGGTCGACCAACCGAGCAGTTCAGTGAACCGTAGATCGACGTGACGATGGATAGCGCCTCAG
ATGCTCATGGGCGTCACAAGTGCGCGGCATGCTTCCGGCAGTTCAACAAGATGGAGCACCTGGTGGAGCACATGCGGGCGGC
GCGGCACTCGTCGCACGAGCCCCGCTGCGACATCTGCCGCAAGCACTGCCGCTCCTTCGAGGCGCTCAGGGACCACCTCGG
CGTCGGCGGCTCCACGCTGCCCAAGGCCGCCTACTGCGCCGACGCCTTCGCCGCGCGCGGCTGCACCATCTGCCTCCGCGT
CCTCGCCAGCGCCGCCGCGCTCGGAGCCCACAGCGCGGCGTGCCGGCTCTCGCGCATCCCACCGCCGATGATGTCGAGGGC
GCTGCAGCATCACCAGCTTCCAGCAGCAACGCAGCCGCATGGAGGAGGAGGAGAAGGAGGCGCGCTGGCGCTGGGCTGCAA
GATGGTCGGCGCCGGGAGCGACGGGTCCCTGGACGTGTGCGCGCGGGTGTGCGTCATCGACGAGCAGGAGAACATCCTGTT
CGAGGCCTTCGTGAAGCCGCTCCTCCCGGTGACGCACTACCGGTACGAGACGACGGGGATCCGGCCGGAGCACCTCCGCGA
CGGCGCGAGCACGACGGTGAAGAACGCGCAGCGGCGGGTGGAGGAGCTGCTGCTCAACGGCGAGCAGCCGTGGAAGGTGC
GCACGAGCCGGGGCAGGGCGAGGCTGCTGGTCGGGCACGGCCTGGACCACGACCTCGACGCGCTGGGCATGGACTACCCG
GGCTACCTCAAGCGCGACACGGCCACGTACCCGCCGCTGATGAAGACGAGCAAGCTCAGCAACTCGCTCAGGTTCCTGACGC
ACAAGTACCTCGGGTACGACATCCAGACGGGGCACCAGCACCCCTTCGAGGACTGCGTCGCCGCCATGCGCCTCTACCGCAG
GATGCGCGGGCAGCAGCAGCACCCCAGGGGGGGGGGGGCGACGCCGACGCACCGGCGGCGGCGACCGCGGACCAGGCG
TTCCCGGCGTGGAGGCAGCGGGAGCTCGAGCGCATGACGCCTGAGGAGCTCCTTCGGCTCTCCACGCCGGACTACCGCTGC
TGGTGCCTCGATGCGTAG
SEQIDNO: 246
CACACACGGCAGAAAGCTTTGGTAAAGTGAGTGAGCGAGCGAGCAGCAGTGGCTGTCGCTCGCGATGATCATGAGTGTTCGAT
CATCACATAGTGACACAACAATGGCGACAGAGGATCTAGTTCCATCCTCCGGCCTAGTATAAATAGGCACCCGTGTTAAGGCTC
CTTGCTGACAGATCATCACATCGGTCGACCAACCGAGCAGTTCAGTGAACCGTAGATCGACGTGACGATGGATAGCGCCTCAG
ATGCTCATGGGTGAGTTGATGCTGCTCTGAGTCTTGAGGTCACAATGTATGCTTTAAGCCTCAAACATATATATATTCCTTTGAG
TTTGAGGTAAATGCATGCTATACCTACCATGCTTGGGACACCTGGATTTTGTGAACCACTTCTATCACAAAAATATAAGGCCATC
AGTGTTTGTTCGAAATCCTTTTTTGGTTTCACTACCAATGTGTGGCTCTAATTTTATATGAGTTGACAGCATAAAATTTGCATTACT
AGAACCATTGTGGACCATCTATTGCTAGTTAAAGTTTCTTTTTGAAACGACCGGCTAGGAGTTTTGTCTGGCATGTATTAATAGA
GAAGAAGATTGGGTTTAAATTTGAAATAGAAGTTCAAAAAGAAGGTTGGGTTGGGGGTGGGGGGCGTAATGAAGTTATTATATT
ATAGAGGTCCAGTAGAGGGCCACTCTCTCAGAGATGATCTCCTTGAGTCTCTCGGCTCCTGCAAGGCTGCAAGGCATCATCTG
ATGCTCACTTCCTCCTTGATTTTCACAATTAGGCTTCCCAAAGGGGAATCGTGACTTTGAAAAAACTAGCATTGTGTCACTTCCA
GAGCTCCCAAGCTGCTACTACGATTGTTCAACGACCGAATGGCTTTAGTAGACATGTCAGCAGCCTTTCCCACTGCATGCCACG
AAATGGACACAGATTGAAAGGAAGCCCAATCATTTCCTTTTTTCCCTTGAATGAACGGGGCTATGTCTATTTCATCATTGATATAA
GGAGAGAACAAACAGACAGTCCGTTTTAAAGTAAAAGAAAACAAACTATGATGGTTACTCTCTCGACACAAGAATCACAAGACTT
TTTGCTCCTACCGCAATCCATGACCCCGGTTCCCGCTTTGATTTGTGCAAAGAGAGATATAGTGTTTCACTCTTCTCAAAGATTA
TTGTGTTTGGTTCCTTACAAATCTCTCAAATGATAAGAAGGGCAATACTCCTAACCGCCCTGCAAGGGACATCTCCAATGGTCCA
AATGGCCAGGCATTTTTAAGTTAGAACAAAGATCATATATTTATGATGAGCACTTTGAACTTATGATGGGAATCTTGTATAAAAAG
AGAAGTAAAACTATGCTGATTCAATTCAAGTGCAAGCAACTTGGCAAACACAAGTCCATCGGGAAGTAAACACATTCCTGTGATT
TGTTTTTGGCGGCAGGCGTCACAAGTGCGCGGCATGCTTCCGGCAGTTCAACAAGATGGAGCACCTGGTGGAGCACATGCGG
GCGGCGCGGCACTCGTCGCACGAGCCCCGCTGCGACATCTGCCGCAAGCACTGCCGCTCCTTCGAGGCGCTCAGGGACCAC
CTCGGCGTCGGCGGCTCCACGCTGCCCAAGGCCGCCTACTGCGCCGACGCCTTCGCCGCGCGCGGCTGCACCATCTGCCTC
CGCGTCCTCGCCAGCGCCGCCGCGCTCGGAGCCCACAGCGCGGCGTGCCGGCTCTCGCGCATCCCACCGCCGATGATGTCG
AGGGCGCTGCAGCATCACCAGCTTCCAGCAGCAACGCAGCCGCATGGAGGAGGAGGAGAAGGAGGCGCGCTGGCGCTGGG
CTGCAAGATGGTCGGCGCCGGGAGCGACGGGTCCCTGGACGTGTGCGCGCGGGTGTGCGTCATCGACGAGCAGGAGAACAT
CCTGTTCGAGGCCTTCGTGAAGCCGCTCCTCCCGGTGACGCACTACCGGTACGAGACGACGGGGATCCGGCCGGAGCACCT
CCGCGACGGCGCGAGCACGACGGTGAAGAACGCGCAGCGGGGGGTGGAGGAGCTGCTGCTCAACGGCGAGCAGCCGTGGA
AGGTGCGCACGAGCCGGGGCAGGGCGAGGCTGCTGGTCGGGCACGGCCTGGACCACGACCTCGACGCGCTGGGCATGGAC
TACCCGGGCTACCTCAAGCGCGACACGGCCACGTACCCGCCGCTGATGAAGACGAGCAAGCTCAGCAACTCGCTCAGGTTCC
TGACGCACAAGTACCTCGGGTACGACATCCAGACGGGGCACCAGCACCCCTTCGAGGACTGCGTCGCCGCCATGCGCCTCTA
CCGCAGGATGCGCGGGCAGCAGCAGCACCCCAGGGGCGGCGGCGGCGACGCCGACGCACCGGCGGCGGCGACCGCGGAC
CAGGCGTTCCCGGCGTGGAGGCAGCGGGAGCTCGAGCGCATGACGCCTGAGGAGCTCCTTCGGCTCTCCACGCCGGACTAC
CGCTGCTGGTGCCTCGATGCGTAG
SEQIDNO: 247
MDSRRESSETLRNKCAACFRQYNRMEHLVEHMKVSYHSVHEPKCGVCGKHCRSFESLREHLIGLLPKVECARVFSVRGCSICLNIFD
SNATVRYHRAACQYSRAAPMPRGGITGRAVALACKMVGGGSDGSMDLCARVCLIGEDEHIIFQTYVKPTLPVTNYRYEVTGIRPEYL
RDAMPLKVAQRRIQEILCNGEPLWKLRPRSYGRAKILVGHGLDHDLERLGLEYPAFMIRDTAKYPPLMKTSKLSNSLKYLTQAYLGYDI
HTGIQDPYEDCVAAMRLYIRMRSQAHPRDYNSGSGEAQNNYPAWRQREFERMSPEELLALSASDYYCWCLDY
SEQIDNO: 248
ACATGTTGGGAAGAGCAATCTCGTTTGATAACATCCTAGAACTTTTGATAGTGCAAATTGCTGCTGCTTAATAGGCAGTAGTTAG
GCATAAGACAGGTGTATTTCTCTCTCGAACCATCGTCGCCCTATGAATGAAAGACTGAAAGTGACAACCTTAGGAGTACTAGGT
ACTTAGAATGACCAGAAAAGGGAGTTGCCGGTACTTAGCTTACGATAACTGCAACTTTAGAATGGCAAGGCTGATCCCTCGTGA
AGGCTTTATCTCTCGGCATTGCCTATAAATAGCCTCCTGGCGTCGCCCATCCTCTCGCCAGCCTCGAGATCGATCTAGGCCTCT
CAGGGACCTTGATCCCCCAAGTCCCGAATTGTAGGAATCTGAGGGCTGATGGACAGCAGGAGGGAGTCCTCGGAGACCTTGA
GGAACAAATGCGCAGCCTGCTTCAGGCAGTACAACAGGATGGAGCACCTGGTGGAGCACATGAAGGTCTCGTACCACTCGGT
GCACGAGCCCAAGTGCGGCGTCTGCGGGAAGCACTGCCGCTCCTTCGAGTCGCTCAGGGAGCATCTCATCGGGCTGTTGCCG
AAGGTGGAGTGCGCGCGGGTCTTCAGCGTCCGCGGCTGCAGCATCTGCCTCAACATTTTTGACAGCAACGCCACCGTCAGATA
CCACCGTGCGGCCTGCCAATACTCTCGTGCTGCTCCGATGCCCAGGGGTGGCATAACCGGTCGTGCGGTTGCCCTGGCTTGC
AAAATGGTAGGGGGAGGGAGTGACGGTTCAATGGACCTTTGTGCAAGGGTGTGCCTCATTGGAGAAGATGAGCACATCATCTT
CCAGACCTATGTCAAACCTACACTTCCTGTCACCAACTACAGGTATGAAGTAACTGGGATAAGGCCAGAGTACCTGAGGGATGC
AATGCCGCTTAAGGTTGCGCAGAGGAGAATCCAGGAAATCCTGTGCAACGGGGAGCCACTGTGGAAGTTACGCCCAAGGAGC
TATGGGAGGGCAAAGATCCTTGTTGGTCATGGCCTGGACCATGACCTTGAGCGCCTAGGGTTGGAGTACCCGGCATTCATGAT
TAGGGATACTGCGAAATACCCACCACTAATGAAGACTAGCAAGCTGAGTAACTCCCTGAAGTACCTTACACAAGCATACCTTGG
GTATGATATCCATACTGGCATTCAGGACCCCTACGAGGACTGTGTTGCAGCAATGAGGCTGTACATCAGGATGAGATCACAAGC
TCACCCAAGAGATTACAACTCCGGCTCAGGCGAGGCCCAGAACAACTATCCAGCCTGGAGGCAGAGAGAGTTCGAGAGGATG
AGCCCAGAAGAACTCCTGGCACTTTCAGCATCAGACTACTATTGCTGGTGCCTGGATTACTAAACTGATAGTCTATAAAGAAAAT
AAGGCAGGCCAACATTGTTGGTTCATTCATATTCCGTCTATGATAATAAATCTTTAGATGTACAAGTAGCTTGCGGCTTGACTATA
TATTGGGGTTAATTATGATGTATAAACAAATGATTTTATATATATGTAATGATGCTTTCATATAAAGATTGCTGTTGTAGATCTGGA
TAACAAGTATTATTATGATTTATGATGCATATGGAAAGAGGGTTTCCCGCTTGCTTTTTATAAATTCTAAAATGAGAAAAGCAGCA
GCACATCTTGATTTATGTACATAAAACGAATGGATGATTGTACATTTTGTGCAGCTTGTCAGACTATCTCAGTGCTATACAAGTAT
ATCTGCATTAGCCTCAGTGCATCACACGTATGTAAACCGGGCGATTCAAGTTTCTGAACTGTTGAAGAAAAGTCTTACACTGGA
GTCGTTGGATTTCCGGTACTGCTTAGTTTCTGTGGGTGGATTCTTAGGTTTAGGCTCGGGTGTTTTTTCCTGCTTGCCATTCTTT
TTCTTGTCCTTGGACTGGCTCCTATTTAGCTTGATGAACTCAAGACACTGTCGAATGATTGTCAGCACCGTGAAATGAGTCTCAA
AGTCGTTCTTGATGACAGGGGGGTGGTGGAGGTTGGGCCCATTGTTGCTCCAGGTGTAGTTCTCAATGAAGTAGACACAATCA
GTTCTAGCCCTGAACGAAACCTCCCGTAGAAGCTCTTCGGCCTGCCTAATGGATCTCATGGCCTTCTTAAAAGTCAATACGATG
ATCAAATTAAG
SEQIDNO: 249
ACATGTTGGGAAGAGCAATCTCGTTTGATAACATCCTAGAACTTTTGATAGTGCAAATTGCTGCTGCTTAATAGGCAGTAGTTAG
GCATAAGACAGGTGTATTTCTCTCTCGAACCATCGTCGCCCTATGAATGAAAGACTGAAAGTGACAACCTTAGGAGTACTAGGT
ACTTAGAATGACCAGAAAAGGGAGTTGCCGGTACTTAGCTTACGATAACTGCAACTTTAGAATGGCAAGGCTGATCCCTCGTGA
AGGCTTTATCTCTCGGCATTGCCTATAAATAGCCTCCTGGCGTCGCCCATCCTCTCGCCAGCCTCGAGATCGATCTAGGCCTCT
CAGGGACCTTGATCCCCCAAGTCCCGAATTGTAGGAATCTGAGGGCTGATGGACAGCAGGAGGGAGTCCTCGGAGACCTTGA
GGTAAGATGATAAGAGATGCTATTCTTTCAGCTTTCATTGATATGCGTACTACTGCAAATGGCCGTGCACTCAGACTGATTAAGT
AGTGCATGCATGGCATACTGCACCTGTCCCTTGTGGGCATATATATGCAATATATTTAAACAGTGCCCAAGATATCATCAAGTCA
GTTCACTAATCTATGCAAGGCTTGAAACATGCATGTCCATTTCTTGTAACCATATGATCCTGTCAGACTGCCGTTGCGAGAGCTG
CTAGCTGTTCATGCATGAAACTGCTCGTGCAAGGATCAGCTTTGCCTCCTGCATTCGATCCTGTATATGTTCCTGAAGGCTAGAA
TCCATACATCATGATCACAAACATATATATGAATGCCCGCCTCATGCAAAGTCGTGTCCCCCATGATCATCAGGAACAAATGCGC
AGCCTGCTTCAGGCAGTACAACAGGATGGAGCACCTGGTGGAGCACATGAAGGTCTCGTACCACTCGGTGCACGAGCCCAAG
TGCGGCGTCTGCGGGAAGCACTGCCGCTCCTTCGAGTCGCTCAGGGAGCATCTCATCGGTATGCAGAAATTAAGCTTTTGCCG
AGAAGAAAAGACGGCAGCTTACATGCAGCCCAACAAGCACGATTTCAATTCTGACGACGCTTCTTCTTCTTCTTCTCCATCTTCC
TTCAGGGCTGTTGCCGAAGGTGGAGTGCGCGCGGGTCTTCAGCGTCCGCGGCTGCAGCATCTGCCTCAACATTTTTGACAGCA
ACGCCACCGTCAGATACCACCGTGCGGCCTGCCAATACTCTCGTGCTGCTCCGGTAATGATATCGATCGATCTGTTGGTCTCTA
CCCTATTCATTATTCATATGCCGTATACTCAGTTCCACTTCAGAGCTCATCAGATGCATAGGCTTCGCTTTGTCGGCTTTGGGCT
TTGGTTGATACTATAGATTCTAATTTTTGTTCCACCGTCCTATGTGGTCCCAGCAGATGCCCAGGGGTGGCATAACCGGTCGTG
CGGTTGCCCTGGCTTGCAAAATGGTAGGGGGAGGGAGTGACGGTTCAATGGACCTTTGTGCAAGGGTGTGCCTCATTGGAGA
AGATGAGCACATCATCTTCCAGACCTATGTCAAACCTACACTTCCTGTCACCAACTACAGGTAATCCTACTTCTCATGCAGTTGC
CATGCATCATGTTACTAGTCTACTAGCAACTCTAGTCGATGGTTGAGGAGAAATTGTGAGACCAGCAAAACCAGAATGAAAGAG
TCGGCAATCTTTCAGGGAGTACCACTATATATGTGCTTGAAAGTTGAAGTTGGACAGCGAAGATATTTGTATGGACTACTTTCGT
AACGACACGAACTGATGGCTATATGCAACATGTTTTTCAGGTATGAAGTAACTGGGATAAGGCCAGAGTACCTGAGGGATGCAA
TGCCGCTTAAGGTTGCGCAGAGGAGAATCCAGGAAATCCTGTGCAACGGGGAGCCACTGTGGAAGTTACGCCCAAGGAGCTA
TGGGAGGGCAAAGATCCTTGTTGGTCATGGCCTGGACCATGACCTTGAGCGCCTAGGGTTGGAGTACCCGGCATTCATGATTA
GGTGAGGAGCAGGGAGGAAAAAAATCACTGTATTTTTCTTTTCTTCCTAACATCTATAGGTCTTGCTTGTTGAGCTATGTATGGT
TCAGGAATCAGTTACCACAGTTATTTTGCCCTTTTTGACAGAAATTGTTATGCATATGCAGGGATACTGCGAAATACCCACCACT
AATGAAGACTAGCAAGCTGAGTAACTCCCTGAAGTACCTTACACAAGCATACCTTGGGTATGTCACTTCTTGGATGATCTATACA
ATCAGAATCAGCCTACTATTATTTAATATCTGGGTAATAATGATTCTAAGGAGATTGTATCCTCTTGTAGGTATGATATCCATACT
GGCATTCAGGACCCCTACGAGGACTGTGTTGCAGCAATGAGGCTGTACATCAGGATGAGATCACAAGCTCACCCAAGAGATTA
CAACTCCGGCTCAGGCGAGGCCCAGAACAACTATCCAGCCTGGAGGCAGAGAGAGTTCGAGAGGATGAGCCCAGAAGAACTC
CTGGCACTTTCAGCATCAGACTACTATTGCTGGTGCCTGGATTACTAAACTGATAGTCTATAAAGAAAATAAGGCAGGCCAACAT
TGTTGGTTCATTCATATTCCGTCTATGATAATAAATCTTTAGATGTACAAGTAGCTTGCGGCTTGACTATATATTGGGGTTAATTAT
GATGTATAAACAAATGATTTTATATATATGTAATGATGCTTTCATATAAAGATTGCTGTTGTAGATCTGGATAACAAGTATTATTAT
GATTTATGATGCATATGGAAAGAGGGTTTCCCGCTTGCTTTTTATAAATTCTAAAATGAGAAAAGCAGCAGCACATCTTGATTTAT
GTACATAAAACGAATGGATGATTGTACATTTTGTGCAGCTTGTCAGACTATCTCAGTGCTATACAAGTATATCTGCATTAGCCTCA
GTGCATCACACGTATGTAAACCGGGCGATTCAAGTTTCTGAACTGTTGAAGAAAAGTCTTACACTGGAGTCGTTGGATTTCCGG
TACTGCTTAGTTTCTGTGGGTGGATTCTTAGGTTTAGGCTCGGGTGTTTTTTCCTGCTTGCCATTCTTTTTCTTGTCCTTGGACTG
GCTCCTATTTAGCTTGATGAACTCAAGACACTGTCGAATGATTGTCAGCACCGTGAAATGAGTCTCAAAGTCGTTCTTGATGACA
GGGGGGTGGTGGAGGTTGGGCCCATTGTTGCTCCAGGTGTAGTTCTCAATGAAGTAGACACAATCAGTTCTAGCCCTGAACGA
AACCTCCCGTAGAAGCTCTTCGGCCTGCCTAATGGATCTCATGGCCTTCTTAAAAGTCAATACGATGATCAAATTAAG
SEQIDNO: 250
MDTRKESSETLRNKCAACYRQYNRMEHLVEHMKVNYHSVHEPRCGVCGKHCRSFESLREHLIGPLPKVECARVFSVRGCSICLNIF
DSNAAVRYHRAACQYTRAAPMPMGSITGRAVSLACKMVGGGSDGSVDLCARVCLTGEDENVIFQTYVKPTAPVTNYRYEVTGIRPE
YLRDAMPLKIAQRRIQEILCNGEPLWKLRPRSYGRAKILVGHGLDHDLERLGLEYPAFMIRDTAKYPPLMKTSKLSNSLKYLTQAYLGY
DIQTGIQDPYEDCVAAMRLYIRMRSQAHPRDYNSGSGEAQNNYPAWRQRELERMSPEELLALSASDYYCWCLDY
SEQIDNO: 251
CGAGCTCGATCTCTTCTCAGGAACCCTTGACCAAAGTGTAGGAGTCTGAGTCATGGACACCAGGAAGGAGTCCTCGGAGACCT
TGAGGAACAAATGCGCAGCCTGCTACAGGCAGTACAACAGGATGGAGCACCTTGTGGAGCACATGAAGGTGAACTACCACTCG
GTGCACGAGCCTAGGTGTGGCGTCTGCGGCAAGCACTGCCGCTCCTTCGAGTCGCTCAGGGAGCATCTCATCGGGCCTTTGC
CAAAGGTGGAGTGCGCGCGGGTCTTCAGTGTTCGCGGCTGCAGCATCTGCCTCAACATCTTTGACAGCAACGCCGCTGTCAGA
TATCACCGTGCTGCCTGCCAATACACCCGTGCTGCTCCGATGCCCATGGGCAGCATAACCGGCCGTGCGGTTTCTCTGGCCTG
CAAAATGGTTGGAGGAGGGAGTGACGGCTCAGTGGACCTTTGTGCAAGGGTGTGCCTCACTGGAGAAGACGAGAATGTCATCT
TCCAGACCTATGTCAAACCTACAGCTCCTGTTACCAACTACAGGTATGAAGTAACTGGGATAAGGCCAGAGTACTTGAGGGACG
CAATGCCACTGAAGATTGCACAGAGGAGGATTCAGGAGATCCTGTGCAATGGGGAGCCTCTGTGGAAGTTACGCCCAAGGAGT
TATGGAAGGGCAAAGATTCTGGTTGGCCATGGCCTGGACCATGATCTGGAGCGCCTAGGGTTGGAGTACCCAGCATTCATGAT
CAGGGACACTGCAAAATACCCACCTCTGATGAAGACTAGCAAGCTGAGTAACTCCCTGAAGTACCTTACACAAGCATATCTGGG
ATATGACATTCAAACAGGCATTCAGGACCCCTACGAGGATTGCGTGGCAGCAATGAGGCTGTACATCAGGATGCGATCACAAG
CTCACCCGAGAGATTACAACTCTGGTTCAGGTGAGGCCCAGAACAACTACCCAGCCTGGAGGCAGAGAGAGCTGGAGAGGAT
GAGCCCAGAAGAACTCCTTGCACTTTCAGCATCAGACTACTATTGTTGGTGCCTGGATTACTAATTGATCAGATACAATGTGAAT
AAGGCAGGCCAATATTGTTGGTCCATTCATATTCTGTCTATGGTAATAAAACCTTTAGATGTACAAGTAGCTTGCGGCTTGACTA
TACTGGGGTCAATTATAACGTATACACAAGGGATTCTATATACATGTAATGCTTTCTTATAAATATTGGTGATTTAGAGATGTAAG
AAGTGATATTATGTTAATGATATTATATGGTAAGAGGGGTTTTCCCCCATGCTTTATGAATCCAAAAAAAATGAGAAAACCAAGAG
TA
SEQIDNO: 252
CGAGCTCGATCTCTTCTCAGGAACCCTTGACCAAAGTGTAGGAGTCTGAGTCATGGACACCAGGAAGGAGTCCTCGGAGACCT
TGAGGTAAGATGATAAGATATGCTATTCTTCCATTTTTTTTCCAGCATTGATATCAAGCTATACTGCACCAATCCCTTATAGGCAT
ATGCAGAAAACTCATGCTAAGGCACCTCAATACCAAACTAATTAAGGCTGGAAACATGTCCATTTATTGTAACCATGAAACCAGC
CATATTGCAGTTGATCCTGCATTTGGTCCTACGTCATCCTGTAATCAGGAAGGCTAGGTTAATCTACATCAAACTGAAGCATATG
CATGTATGTCCCCCATGATCAGGAACAAATGCGCAGCCTGCTACAGGCAGTACAACAGGATGGAGCACCTTGTGGAGCACATG
AAGGTGAACTACCACTCGGTGCACGAGCCTAGGTGTGGCGTCTGCGGCAAGCACTGCCGCTCCTTCGAGTCGCTCAGGGAGC
ATCTCATCGGTAAGCCCAAAAGAACTTGCTGAGAGGAAAAGATGGCAGCTTACTTCTCAACGAGCGTGGTTTCTGATGCTTCTT
GTTCTCCATCTTCAGGGCCTTTGCCAAAGGTGGAGTGCGCGCGGGTCTTCAGTGTTCGCGGCTGCAGCATCTGCCTCAACATC
TTTGACAGCAACGCCGCTGTCAGATATCACCGTGCTGCCTGCCAATACACCCGTGCTGCTCCGGTAATGGCTTACTGATTTCCA
CTCTATTCATTCATATTATCATACATACCGTATATTCAGTCCATTTCAGAACTCAGATGCATAGACTTCCCTTTGTTGCGAATTTGG
TTGATACTAGATTCTAACATGTTTTTCCCTTTCTATGCGGTCCCAGATGCCCATGGGCAGCATAACCGGCCGTGCGGTTTCTCTG
GCCTGCAAAATGGTTGGAGGAGGGAGTGACGGCTCAGTGGACCTTTGTGCAAGGGTGTGCCTCACTGGAGAAGACGAGAATG
TCATCTTCCAGACCTATGTCAAACCTACAGCTCCTGTTACCAACTACAGGTAACATTTCATTCCATCAGTTCTCCAGACCAATTGT
CTACCATGCCTAGATGATGGTAGAAGAGAAAGTACCAGTACAGCTATGCCTGAAACTAGACAATAGAGATTTGGATGGACAGCT
TTCTGAAATGAGATGACTGATTACTTGTGTGTTCAGGTATGAAGTAACTGGGATAAGGCCAGAGTACTTGAGGGACGCAATGCC
ACTGAAGATTGCACAGAGGAGGATTCAGGAGATCCTGTGCAATGGGGAGCCTCTGTGGAAGTTACGCCCAAGGAGTTATGGAA
GGGCAAAGATTCTGGTTGGCCATGGCCTGGACCATGATCTGGAGCGCCTAGGGTTGGAGTACCCAGCATTCATGATCAGGTGA
GGAGCACAAGATAGCTAAGTCAGTGGATTATGGTATTTCTTCTTTCTAACATATACATATATTGTTTACTGAGCTATGGTTCAGGA
ATCAGGAGTCAAAGTTGCCACGTCAGTTTTGTCTTTTGACACACTATTGTGCATGTGCAGGGACACTGCAAAATACCCACCTCT
GATGAAGACTAGCAAGCTGAGTAACTCCCTGAAGTACCTTACACAAGCATATCTGGGGTATGTCACTAGCTAGGCTAATCTACA
CAATCAACCTACTCTTAATATCTTCGTAATGCTAAATAGATTATTTTTGCATCCTATTGTAGATATGACATTCAAACAGGCATTCAG
GACCCCTACGAGGATTGCGTGGCAGCAATGAGGCTGTACATCAGGATGCGATCACAAGCTCACCCGAGAGATTACAACTCTGG
TTCAGGTGAGGCCCAGAACAACTACCCAGCCTGGAGGCAGAGAGAGCTGGAGAGGATGAGCCCAGAAGAACTCCTTGCACTT
TCAGCATCAGACTACTATTGTTGGTGCCTGGATTACTAATTGATCAGATACAATGTGAATAAGGCAGGCCAATATTGTTGGTCCA
TTCATATTCTGTCTATGGTAATAAAACCTTTAGATGTACAAGTAGCTTGCGGCTTGACTATACTGGGGTCAATTATAACGTATACA
CAAGGGATTCTATATACATGTAATGCTTTCTTATAAATATTGGTGATTTAGAGATGTAAGAAGTGATATTATGTTAATGATATTATA
TGGTAAGAGGGGTTTTCCCCCATGCTTTATGAATCCAAAAAAAATGAGAAAACCAAGAGTA
SEQIDNO: 253
MDSRRESSETLRNKCAACYRQYNRMEHLVEHMKVNYHSVHEPRCGVCGKHCRSFESLREHLIGPLPKVECARVFSVRGCSICLNIF
DSNAAVRYHRAACQYTRAAPMPRGSITGRAVALACKMVGGGSDGSVDLCAMVCLIGEDENIIFQTYVKPTAPVTNYRYEVTGIRPEY
LRDAMPLKVAQRRIQEILCNGKPLWKLRPRNYGRAKILVGHGLDHDLERLGLEYPAFMIRDTAKYPPLMKTSKLSNSLKYLTQAYLGY
DIQTGIQDPYEDCVAAMRLYIRMRSQAHPRDYNSGSGEVQNNYPAWRQRELERMSPEELLALSASDYYCWCLDY
SEQIDNO: 254
GCTCGATCTCTACTCAGGAACCCTTGACCCAAGTGTAGGAATCTGAGTCATGGACAGCAGGAGGGAGTCCTCGGAGACCTTGA
GGAACAAATGCGCGGCCTGCTACAGGCAGTACAACAGGATGGAGCACCTGGTGGAGCACATGAAGGTGAACTACCACTCGGT
GCACGAGCCCAGGTGCGGCGTCTGCGGCAAGCACTGCCGCTCCTTCGAGTCACTCAGGGAGCATCTCATCGGGCCTTTGCCG
AAGGTGGAGTGCGCGCGGGTCTTCAGCGTTCGCGGCTGCAGCATCTGCCTCAACATCTTTGACAGCAACGCCGCCGTCAGAT
ATCACCGTGCTGCCTGCCAATACACCCGTGCTGCTCCGATGCCCAGGGGCAGCATAACTGGCCGTGCGGTTGCTCTGGCTTGT
AAAATGGTTGGAGGAGGGAGTGACGGCTCAGTGGACCTTTGTGCAATGGTGTGCCTCATTGGAGAAGACGAGAATATCATCTT
CCAGACCTATGTCAAGCCTACAGCTCCTGTTACCAACTACAGGTATGAAGTAACTGGGATAAGGCCAGAGTACTTGAGGGATGC
AATGCCACTGAAGGTTGCACAAAGGAGGATCCAAGAGATCCTGTGCAATGGGAAGCCGCTGTGGAAGTTACGCCCAAGGAATT
ATGGGAGGGCAAAGATTCTGGTTGGCCACGGCCTGGACCATGATCTTGAGCGCCTAGGGTTGGAGTACCCAGCATTCATGATC
AGGGACACTGCAAAATACCCGCCTCTGATGAAGACTAGCAAGCTGAGTAACTCCCTGAAATACCTTACACAAGCATATCTGGGG
TATGACATTCAAACAGGCATTCAGGACCCCTACGAGGATTGTGTGGCAGCAATGAGGCTGTACATCAGGATGCGATCACAAGC
TCACCCGAGAGATTATAACTCTGGTTCAGGTGAGGTCCAGAACAACTACCCAGCCTGGAGGCAGAGAGAGCTGGAGAGGATGA
GCCCAGAAGAACTCCTTGCACTTTCAGCATCAGACTACTATTGCTGGTGCCTGGATTACTAAATTGATTGGCTATAAAGCGAATA
AGGCAGGCCAACATTGTTGGTCCATTCATATTCCGTCTATGACAATAATCTTTAGATGTACAAGTTGCTTGCGGCTTGACTATAC
TGGGGTTAATTATAACATATAAACAAGGGATTCTATATACATGTAATGCTTTCTTATAAATATTGGTGATTTAGAGATGTAAGAAGT
GATATTATTATCTTAATGATATTATATGG
SEQIDNO: 255
GCTCGATCTCTACTCAGGAACCCTTGACCCAAGTGTAGGAATCTGAGTCATGGACAGCAGGAGGGAGTCCTCGGAGACCTTGA
GGTAAGATGATAAGATATGCTATTCTTTCAGTTTTCAGCATTGATATCAAGCTATACCACACCTCTCAAGCTAAGGCACCTCAATT
ACCAATCCTTGTCCATTTCTTGCAACCATGAAACAAGTCAGATTACAGTCGATCCTGCATTATATTTGATCCTACGTCGTCCTGTA
ACCAGGAAGGCTATAGGTTAATCTATGCATCAAAATGAAGCATATGCATGTATGTCCTCCATGGTCAGGAACAAATGCGCGGCC
TGCTACAGGCAGTACAACAGGATGGAGCACCTGGTGGAGCACATGAAGGTGAACTACCACTCGGTGCACGAGCCCAGGTGCG
GCGTCTGCGGCAAGCACTGCCGCTCCTTCGAGTCACTCAGGGAGCATCTCATCGGTATGCAAAAATGAATTTGCCAAGAGGAA
AATATAGCAGCTTACTGCTGAACGAGTGTGGTTTCTGACTCTTCTTGTTCTCGATCTTCAGGGCCTTTGCCGAAGGTGGAGTGC
GCGCGGGTCTTCAGCGTTCGCGGCTGCAGCATCTGCCTCAACATCTTTGACAGCAACGCCGCCGTCAGATATCACCGTGCTGC
CTGCCAATACACCCGTGCTGCTCCGGTAATGGTTTATTGATTTCTACTCTATTCATTCATGTATACAGTATATTCAGTCCATTTCA
GAACTCGGATGCATAGACTTCCCTTTGTTCTGACTTTGGTTGATACTAGATTCTAACATTTGTTTTCTTTTCCATGCGGTCCCAGA
TGCCCAGGGGCAGCATAACTGGCCGTGCGGTTGCTCTGGCTTGTAAAATGGTTGGAGGAGGGAGTGACGGCTCAGTGGACCT
TTGTGCAATGGTGTGCCTCATTGGAGAAGACGAGAATATCATCTTCCAGACCTATGTCAAGCCTACAGCTCCTGTTACCAACTA
CAGGTAACATTTCATTCCATCACTTCTCCAGACCAATTGTCTACCATGTCTAGATGACGGTAGAAGATAAATTAGCAGGCCAGCG
AAACCAGAAAGAAAGCATTACCGATCATTCAATGAACACTATGCTTGAAACTAGATAGTAGAGATTTGGATGGACTGCTTTCTGA
AAATGAGATGACCAATTACTTGTGTGTTCAGGTATGAAGTAACTGGGATAAGGCCAGAGTACTTGAGGGATGCAATGCCACTGA
AGGTTGCACAAAGGAGGATCCAAGAGATCCTGTGCAATGGGAAGCCGCTGTGGAAGTTACGCCCAAGGAATTATGGGAGGGC
AAAGATTCTGGTTGGCCACGGCCTGGACCATGATCTTGAGCGCCTAGGGTTGGAGTACCCAGCATTCATGATCAGGTGAGGAG
CACAAGATAGCTAAGTCATTGTTTTATAGTATTTCTTCTTTCTAACATATATAGATCTTGTTTACTGAGCTATGGTTCAGGAATCAG
GAGTCAAAGTTTCCACGTCAGTTGTCTTTTGACACATTATTATACATGTGCAGGGACACTGCAAAATACCCGCCTCTGATGAAGA
CTAGCAAGCTGAGTAACTCCCTGAAATACCTTACACAAGCATATCTGGGGTATGTCACTAGCTAGGCTAATGTACACAATCAACC
TACTCTTTAATATTTGTGTAATGCTAAATAGATTGTTTTTGCATCCTATTGTAGGTATGACATTCAAACAGGCATTCAGGACCCCT
ACGAGGATTGTGTGGCAGCAATGAGGCTGTACATCAGGATGCGATCACAAGCTCACCCGAGAGATTATAACTCTGGTTCAGGT
GAGGTCCAGAACAACTACCCAGCCTGGAGGCAGAGAGAGCTGGAGAGGATGAGCCCAGAAGAACTCCTTGCACTTTCAGCAT
CAGACTACTATTGCTGGTGCCTGGATTACTAAATTGATTGGCTATAAAGCGAATAAGGCAGGCCAACATTGTTGGTCCATTCATA
TTCCGTCTATGACAATAATCTTTAGATGTACAAGTTGCTTGCGGCTTGACTATACTGGGGTTAATTATAACATATAAACAAGGGAT
TCTATATACATGTAATGCTTTCTTATAAATATTGGTGATTTAGAGATGTAAGAAGTGATATTATTATCTTAATGATATTATATGG
SEQIDNO: 256
MDYRNESSDTLRNKCAACYRQFNKKEHLVEHMRTSYHSVHEPMCGVCKKHCRSFESLREHLIGPLPKAECERIFKERGCDICLSILG
NRTSLRAHRESCLSRPNNNGLLYRMANLGIQDELRIDNSRGRVVALACKMVGGGSDGSLDLCARVCLIDEHERILFHSYIKPNIPVTN
YRYEMTGIRPEYLRDAMPLKNVSRKIQEFLCNGEPIWQIRSKGGRSRILVGHGLDHDLKCLEMDYPAIKMRDTAKYPPLMKTSKLSNS
LKYLTRAYLGYDIQSGVQDPYEDCVATMKLYMRMKLSQFHKKENYPLATDPQNKNNFASWRQNELERMTPDQLLDISRSDYYCWCL
DSQDY
SEQIDNO: 257
ATGGATTATAGAAATGAGTCTTCCGATACTCTCAGGAACAAGTGTGCAGCGTGCTATAGGCAGTTCAACAAAAAGGAACATCTT
GTGGAACACATGAGGACATCTTATCATTCAGTTCATGAGCCCATGTGTGGTGTTTGCAAAAAACACTGCCGCTCTTTTGAATCTT
TAAGGGAGCATCTAATTGGGCCACTTCCAAAGGCAGAATGTGAAAGAATTTTCAAGGAACGAGGATGTGATATTTGTTTGTCAAT
CCTTGGCAATCGAACTTCTCTACGGGCTCATAGAGAATCATGCCTCTCACGTCCTAATAATAACGGTTTATTGTATCGCATGGCT
AATTTGGGGATTCAAGATGAACTAAGAATTGATAACAGCAGAGGAAGAGTGGTTGCTCTTGCTTGTAAAATGGTTGGTGGTGGA
AGTGATGGATCTTTAGATCTTTGTGCTAGGGTTTGTCTCATTGATGAACATGAAAGAATCCTCTTTCATTCATATATCAAACCAAA
CATTCCTGTCACTAACTACAGGTATGAAATGACGGGTATAAGACCAGAATATTTGAGGGATGCAATGCCTTTAAAAAATGTGTCA
AGAAAAATTCAAGAATTTCTTTGCAATGGGGAACCTATTTGGCAAATCCGTTCTAAAGGTGGAAGGTCTAGGATTCTTGTTGGCC
ATGGTTTGGATCATGATCTTAAATGTTTGGAGATGGATTATCCAGCAATAAAGATGAGGGATACTGCAAAATACCCACCACTTAT
GAAAACAAGCAAGCTCAGTAACTCCCTCAAGTACTTGACCAGAGCTTACCTCGGGTATGATATTCAAAGTGGAGTACAAGATCC
GTATGAAGACTGTGTGGCCACAATGAAACTCTACATGAGAATGAAATTATCACAATTTCACAAAAAAGAGAATTATCCTCTTGCTA
CTGATCCACAAAATAAAAATAACTTTGCATCTTGGAGGCAAAATGAGCTTGAGAGGATGACTCCTGACCAACTATTGGATATTTC
AAGGTCTGATTATTATTGTTGGTGTTTGGACTCACAAGATTATTAA
SEQIDNO: 258
ATGGATTATAGAAATGAGTCTTCCGATACTCTCAGGTAATCTATTCATTTCATTTACGCAAATATTTCATTTTTTTACGTCAACATT
TAGATTCGGGTCTAATGTTTGATCAAACACAGAAATAGTCATCAAACATTAACTTTTGAACCATATATATTATCTAACAAAAAATTG
AAAATTGTAAGAATTTTTTTTAAGAGAATTGCGAGAGAAATTTAAAAAAAAAATGAATTATTTACTAGCTAAACAATTTATTGATGG
GAGTACGTACGTAGTACAGGAACAAGTGTGCAGCGTGCTATAGGCAGTTCAACAAAAAGGAACATCTTGTGGAACACATGAGG
ACATCTTATCATTCAGTTCATGAGCCCATGTGTGGTGTTTGCAAAAAACACTGCCGCTCTTTTGAATCTTTAAGGGAGCATCTAAT
TGGTATGCTAGCTACACTTACCCAAAAAAAGCATCCTTTTTTTTCGAGTTTAAGTTATATATATCGTCACGTTCAATTTTTTTTATTT
GGTCACTAATGTACCGCAGGGCCACTTCCAAAGGCAGAATGTGAAAGAATTTTCAAGGAACGAGGATGTGATATTTGTTTGTCA
ATCCTTGGCAATCGAACTTCTCTACGGGCTCATAGAGAATCATGCCTCTCACGTCCTAATAATAACGTAAGCAATCAATTCATCC
AAAAAAAAAATTAAAATTATTAGAGTAGAATAGGAAAAATCTATGCAAGTACTGATACCATGTTAGATTGTGTGACTGTCTTATTG
CAGGGTTTATTGTATCGCATGGCTAATTTGGGGATTCAAGATGAACTAAGAATTGATAACAGCAGAGGAAGAGTGGTTGCTCTT
GCTTGTAAAATGGTTGGTGGTGGAAGTGATGGATCTTTAGATCTTTGTGCTAGGGTTTGTCTCATTGATGAACATGAAAGAATCC
TCTTTCATTCATATATCAAACCAAACATTCCTGTCACTAACTACAGGTGATCCATTTCAATTAATAATGTAAAAAAAAATCTTAACA
CAATTAATAAATTTCAACTAATTTGTTATAACATTTTTATTTAGTTACTACGTTATTAAACGGAGTAACAATATACTTATTGTTCTAA
AGTTAATTTACTACATAAAATTTAAACTCAAATATTAAAGCACGTTCTCTTATTTTTGGTCTTTTTGCGGCCCATTCCATGACAAGA
ACAACAAGGATGTGTCATGATAGTGTATAATTTTTCTTATATTGACGATGTATATTAACTTAAACTCTGACGAGATAAATATATATG
TTTATAGGTATGAAATGACGGGTATAAGACCAGAATATTTGAGGGATGCAATGCCTTTAAAAAATGTGTCAAGAAAAATTCAAGA
ATTTCTTTGCAATGGGGAACCTATTTGGCAAATCCGTTCTAAAGGTGGAAGGTCTAGGATTCTTGTTGGCCATGGTTTGGATCAT
GATCTTAAATGTTTGGAGATGGATTATCCAGCAATAAAGATGAGGTAAATTAATAATTATTTCATCAATTATATAATTTAAAAATAC
TTTACTGCTATATAGAAAAAACATGAAATTAACTCCTACTCATTACTATTTTATATATTACAATCAAATGTCTTTGGTAATCTAGTTT
ACAAAGTACATACACAGTAGCGTATATTTTATACTAAAATATACATATACTTATTCATTTGATATACATACCGTATACATTAACATAT
ATAGCCAAAGTATATAAATAGTGTATATTTCGACCATATTTACGTGAGTTAATTCCCTTCTAACATTTTATTTTATTTTTTGTAAAGG
GATACTGCAAAATACCCACCACTTATGAAAACAAGCAAGCTCAGTAACTCCCTCAAGTACTTGACCAGAGCTTACCTCGGGTAAT
TTATACATTAAATAGTGCATATATAAAACTTTATCCTTAATAATATTATTAATGTAATTTGTTGTTTTTATAAAAAAATAAAATAAATA
TGAATGGACAATAATAAGGGAAATTGTGTGTAGGTATGATATTCAAAGTGGAGTACAAGATCCGTATGAAGACTGTGTGGCCAC
AATGAAACTCTACATGAGAATGAAATTATCACAATTTCACAAAAAAGAGAATTATCCTCTTGCTACTGATCCACAAAATAAAAATA
ACTTTGCATCTTGGAGGCAAAATGAGCTTGAGAGGATGACTCCTGACCAACTATTGGATATTTCAAGGTCTGATTATTATTGTTG
GTGTTTGGACTCACAAGATTATTAA
SEQIDNO: 259
MEYRNKCAACYRQFNKMEHLVEHMRISYHSVHEPMCLICRKHCRSFESLREHLIGPLPKAECEKIFKERGCDICLTLLASRNALRTHK
ESCQLSRSNNGLLYRMTRLGLGFQDDLKISNSQGKVVALSCKMVGGGNDGSLHLCARVCLIDEHERILFESYVAPNIPITNYRYEISGI
RPEYMRNAMPLKQVSRKIQDYLONGEPIWQIRTRSGRARILVGHNLDHDLKCLEMDYPTIMLRDTAKYPPLMKTSKLSNSLKYLSKAY
LGYEIQTGVQDPYDDCVATMRLYKRMKSQAHIRENYPLAIDPQNRNNFASWKENELVKMMPSQLLEISRSDYYCWCLDS
SEQIDNO: 260
ATGGAGTACAGGAACAAATGTGCAGCATGCTATAGGCAGTTCAACAAAATGGAGCATCTAGTTGAACACATGAGGATATCTTAT
CATTCAGTTCATGAACCTATGTGTTTGATTTGTAGAAAACATTGTCGATCTTTTGAATCTTTGAGAGAACATCTCATTGGGCCATT
GCCAAAGGCTGAGTGTGAGAAGATTTTCAAGGAACGAGGATGTGATATTTGTTTGACACTCCTTGCTAGCCGGAATGCACTAAG
GACTCACAAGGAATCATGTCAACTCTCACGCTCAAATAATGGTTTGCTCTATCGTATGACTAGGTTGGGATTAGGTTTTCAAGAT
GACCTAAAAATTAGCAATAGTCAAGGAAAAGTTGTTGCTCTTTCTTGCAAAATGGTAGGTGGTGGCAACGATGGCTCTCTTCATC
TTTGTGCAAGAGTTTGCCTAATTGATGAACATGAAAGAATCCTCTTTGAATCCTATGTTGCACCAAATATTCCCATCACGAACTAT
AGGTATGAAATATCGGGGATTAGGCCAGAATACATGAGAAATGCAATGCCATTGAAGCAAGTATCGAGAAAAATTCAAGATTATC
TTTGTAATGGTGAACCTATTTGGCAAATTCGTACTAGAAGTGGAAGGGCTAGGATCCTTGTTGGTCACAATTTGGATCATGATTT
AAAATGCTTAGAAATGGACTACCCAACAATAATGTTAAGGGATACAGCAAAATACCCTCCACTAATGAAAACAAGCAAGCTGAGC
AACTCACTCAAGTACTTGAGCAAAGCTTATCTTGGATATGAAATTCAAACAGGAGTTCAAGATCCATATGATGATTGTGTTGCAA
CAATGAGGTTGTACAAGAGAATGAAATCACAAGCTCATATAAGGGAGAATTATCCACTTGCAATTGACCCACAAAATCGTAATAA
TTTTGCATCATGGAAGGAAAATGAACTTGTGAAGATGATGCCTTCACAATTACTAGAAATCTCACGATCTGATTATTATTGTTGGT
GTTTGGATTCCTAA
SEQIDNO: 261
ATGGAGTACAGGAACAAATGTGCAGCATGCTATAGGCAGTTCAACAAAATGGAGCATCTAGTTGAACACATGAGGATATCTTAT
CATTCAGTTCATGAACCTATGTGTTTGATTTGTAGAAAACATTGTCGATCTTTTGAATCTTTGAGAGAACATCTCATTGGTAATCTT
CTTTCTTTTTTCCTTCCTAGCAACAAGTTGCAATAGTATTAGTTTGCAGAAGGGGGTTCGTGGGTTTGGACAAAAAAAATAATATA
TATATATATATATATATGTATATGTATATATATTAACCTGTGAACTCTCTAATAAATTTGATTGACAGCTTAGTAGTAAGAAAGGGG
TGGTGAAAATGATTTTCACGCTAATGGTGTGGCTTCAAACCCCACCATCAAGCATGTTTGCAATATTTTTGTCCTGAAATTTACAA
CCCCAAAATTCTAATCCTGGCTCGGCCTCCGAGTCTAGTTAACTTTTTCTTCTAAATTAGTCATATAATTGTATTTTAGGGCCATT
GCCAAAGGCTGAGTGTGAGAAGATTTTCAAGGAACGAGGATGTGATATTTGTTTGACACTCCTTGCTAGCCGGAATGCACTAAG
GACTCACAAGGAATCATGTCAACTCTCACGCTCAAATAATGTATGTATACTTATTCCAACAACACAACGAACATCAGTTTATTTTA
AAATAAAAAAGATATAATAGATTTTTTTTTTCAATTTCTGGTTATTTAGCATTACCCTTTCTCAAATACTCGTAGTTTTATACATTTG
TTAATTTTCAGGGTTTGCTCTATCGTATGACTAGGTTGGGATTAGGTTTTCAAGATGACCTAAAAATTAGCAATAGTCAAGGAAAA
GTTGTTGCTCTTTCTTGCAAAATGGTAGGTGGTGGCAACGATGGCTCTCTTCATCTTTGTGCAAGAGTTTGCCTAATTGATGAAC
ATGAAAGAATCCTCTTTGAATCCTATGTTGCACCAAATATTCCCATCACGAACTATAGGTAATTGTCGTACACCAGTAATTAGTGT
ATTAAAGTTTGATTAATTAACATAATATAGACGGGTTGATCAAATGTTTAGGTATGAAATATCGGGGATTAGGCCAGAATACATGA
GAAATGCAATGCCATTGAAGCAAGTATCGAGAAAAATTCAAGATTATCTTTGTAATGGTGAACCTATTTGGCAAATTCGTACTAG
AAGTGGAAGGGCTAGGATCCTTGTTGGTCACAATTTGGATCATGATTTAAAATGCTTAGAAATGGACTACCCAACAATAATGTTA
AGGTAAGTCCTTTAATTGTCGAGTTTACACAACATACATGTATAAATAATAATTTGATAAATAAGACAACTAATTAAAATATATTTTA
CGTAGGGATACAGCAAAATACCCTCCACTAATGAAAACAAGCAAGCTGAGCAACTCACTCAAGTACTTGAGCAAAGCTTATCTT
GGGTACGTACGTACGTACGTAAATACTTTAAATTGTTAATTATTGTGACCTTTTATATACTCCAGTTTCTAAATATAAAAAATTATA
TCTAAATTCACACGAGACATTTGTTAGTTTAACCTTGGTACTAATAAGAATCAATCTTAATTGTCTTGTAATTGAATAGATATGAAA
TTCAAACAGGAGTTCAAGATCCATATGATGATTGTGTTGCAACAATGAGGTTGTACAAGAGAATGAAATCACAAGCTCATATAAG
GGAGAATTATCCACTTGCAATTGACCCACAAAATCGTAATAATTTTGCATCATGGAAGGAAAATGAACTTGTGAAGATGATGCCT
TCACAATTACTAGAAATCTCACGATCTGATTATTATTGTTGGTGTTTGGATTCCTAA
SEQIDNO: 262
HKCAACFRQFNKIEHLVDHMRTSFHSHHEPTCAICKKHCRSLDSLREHLIGPLPKQECKNIFATRGCKFCLAIFDSSYSQRLHQERCQ
FSPVNSGLLARFANLGIRDGSTVIDSGRTRGSGAIALACKYVGGGSDGSMDICAKVCLIDEGENVIFYSYVKPVTAVTNYRYETTGIRP
EHIRDAMPVKQVQKKIQEILYNGGEKARILVGDCVEDDLKRLQIGYPSFMIRDTANYPPLMKSSKLCNSLKYLAQVYLGFDLQNGIQDP
YEECIVAMRLYKRMRSQVHRKENYPMASDPQNKNNFAIWRENELQRMSPEQMLEISRSDYYCWCMDLRI
SEQIDNO: 263
GCACAAGTGTGCAGCTTGTTTTAGGCAATTCAATAAGATAGAGCATTTGGTAGATCATATGAGGACTTCTTTTCACTCACATCAT
GAACCAACTTGTGCCATTTGCAAGAAACATTGTCGATCTCTTGATTCTCTTAGAGAACATCTCATTGGGCCACTGCCAAAACAAG
AATGCAAAAACATCTTTGCTACAAGAGGATGCAAGTTTTGCTTGGCCATCTTTGACAGTTCTTACTCACAAAGACTCCACCAAGA
AAGATGCCAATTCTCTCCTGTAAATTCTGGACTTCTTGCTCGTTTCGCCAACTTGGGAATTCGTGACGGTTCAACCGTCATCGAC
AGTGGAAGAACACGAGGGTCAGGGGCCATCGCGCTAGCTTGCAAATATGTAGGTGGAGGAAGTGATGGGTCGATGGACATAT
GTGCTAAGGTTTGCCTTATTGATGAGGGTGAGAACGTCATCTTCTATAGCTATGTCAAGCCCGTAACTGCTGTTACAAATTATAG
GTATGAAACAACTGGAATTCGTCCAGAACACATTCGAGATGCAATGCCAGTGAAACAAGTTCAAAAGAAAATTCAAGAAATCCTC
TACAATGGAGGTGAGAAGGCTAGGATTCTTGTAGGTGATTGCGTCGAAGACGATCTCAAACGCTTACAAATCGGTTACCCATCC
TTCATGATAAGGGACACAGCAAATTATCCACCATTGATGAAGTCAAGCAAGCTTTGCAATTCACTCAAGTATCTAGCTCAAGTGT
ATCTAGGATTTGATCTTCAAAATGGTATACAAGATCCTTATGAAGAATGTATCGTTGCTATGAGATTATACAAGAGAATGAGATCA
CAAGTTCATAGGAAAGAGAACTATCCAATGGCTTCTGACCCACAAAACAAAAATAATTTTGCTATTTGGAGGGAAAATGAGCTTC
AAAGGATGAGTCCAGAACAAATGTTGGAGATTTCTAGGTCTGATTATTATTGTTGGTGCATGGATTTGAGGATTTGA
SEQIDNO: 264
GCACAAGTGTGCAGCTTGTTTTAGGCAATTCAATAAGATAGAGCATTTGGTAGATCATATGAGGACTTCTTTTCACTCACATCAT
GAACCAACTTGTGCCATTTGCAAGAAACATTGTCGATCTCTTGATTCTCTTAGAGAACATCTCATTGGTAATGTCACTCTTCTAAT
TCATAATTGGACTTCATTTTTTAAAAAAATTTGGAACATACCTATGTCAACCAAAATATTTACAAAATTTAATTAAATATCATAGTAT
TTCTACGATGGACCGTGATAGACGCACATAGTGGTCTATCATGTCTATTATCGCAAATAGATTGTGATATATTTTTATTATATTTGT
GAATATTTTTAGAAATTTTGTCATTTAAAATAATTTTTCTAGAAATTAACCCAAAAGTCTAATAAAAGTTACAATATATTTTGTATCT
AGTACTATGTTAAAAATTAATTTCTAAGCAGATGAGTTATGATAAATTTATTGTTAGAATATTATATTTCCGATCGATGAACTTTGA
GTTTCATCAATAAATTTTAAAGATAGTCCCTCTCTATATATATTTAGTTTAGTAAAAAACTAGTCTCTCTTAACTAGCTTTTTCGTTA
TTAATTTTGAGTATATTTTTTTCTCTACTAGTATAAGCTGTCTTCCTATTCAAAATATAAGTACTAAAATAAAATGAAACCTAAAGAA
TATAAATAATCAAATGATATTTTAACGTAGTGTAAAAATTTATAGATCAAGACTCTAACACATGTGAAATAAACATCAATATTTGAG
AAAAAAATGATGTTATTAGGAGTTCGAACACCAAACTTCATTATCTAATATATTATTATGTTAAGTATCTAATATATTATTATGTTAA
GAGCTTAAGCTGATGAGTTTACTATTCTTACGTTTTCGTTATTGTATTGTTATTAGGGCCACTGCCAAAACAAGAATGCAAAAACA
TCTTTGCTACAAGAGGATGCAAGTTTTGCTTGGCCATCTTTGACAGTTCTTACTCACAAAGACTCCACCAAGAAAGATGCCAATT
CTCTCCTGTAAATTCTGTATGAATCCTAAAAAACCATTCTATTTAATCAAACAGAATGCATAAATATATATATATATAATTCTTGTTG
ATTTTAAAATCTTGATGTTATTTTGCTTTTTGGGACATCAGGGACTTCTTGCTCGTTTCGCCAACTTGGGAATTCGTGACGGTTCA
ACCGTCATCGACAGTGGAAGAACACGAGGGTCAGGGGCCATCGCGCTAGCTTGCAAATATGTAGGTGGAGGAAGTGATGGGT
CGATGGACATATGTGCTAAGGTTTGCCTTATTGATGAGGGTGAGAACGTCATCTTCTATAGCTATGTCAAGCCCGTAACTGCTGT
TACAAATTATAGGTAAGTAAAATTAAATTCATGTATATAAATTTGAAGTTTAATATTATACTCCTTTTATTTTTATTTTTTGGAATTTG
AGATTCATTTTTCCGTCTAAATTGTCGATTTTTTTTAGAAAAGTTTAGGAACCAAATAAAAACTCATTTGACTATTTTCGAACTTAA
AACATCAACAACTTTATAATTAATTTACTTCTTTTAAAAGGAAATTGAACCAATAAAGTAATTAATTTACTTTATAATTTTTAGAACT
ATGTGATGGAACTTAAGGTCAACATGTATTTATTATTAGAATTTAATCCCTAGTTAGAATTTAGTCATTATAGTTTAGAACGGCATA
GATCAAGTTTAATCTAGTCTACTCCCGATTTATTGCATCTTATTCAAATTTTTTTGTCAGTTGATATATACTTTGAGTGTTGTTGGG
GCTTCATAGATATAAAACAAAAAATTGGTGGAACTTAGAGTGAACTCAAGTTTTGTTTGGTTTAGTTTAACAGTACTCTTGATAAA
ACCCTAGACAATACCTAATTTTAATAAAAATAATTTACCAAACCATATTGACTTAAATTCAAACTTTGGTCAAACCAAATTTGCAAT
TTAACCTAATAATAATAACCCATAAAATTTTATTAAATTTTCCATTTCTTTAGAAATGGAATTTTATCAAGCACATTCGAGATGTTAA
AATTATATATTGTTTTAACCTTTGATATGTTAAAATTAACATTAGGTATGAAACAACTGGAATTCGTCCAGAACACATTCGAGATGC
AATGCCAGTGAAACAAGTTCAAAAGAAAATTCAAGAAATCCTCTACAATGGAGGTGAGAAGGCTAGGATTCTTGTAGGTGATTG
CGTCGAAGACGATCTCAAACGCTTACAAATCGGTTACCCATCCTTCATGATAAGGTAAATTGCTCGTAATAAAATTTAAATTTGTC
GTAACCTATCAACATAATTCATTTTAAAATTTCATATAAAAAATAACAAACATGATCTTCTAAGGATCAACTATATTTTGCATATATA
TATATATATATATATATATATATATATATATATATATATTATTTNNNNNNNNNNNNNNNNNNNNNNNNNNNNNNNNNNNNNNNNNN
NNNNNNNNNNNNNNNNNNNNNNNNNNNNNNNNNNNNNNNNNNNNNNNNNNTACTATTATTATATATATATATATATATATATATA
TATATATATATATATATATATATATATTACTTTTTTTGTTGGTTGAATGCCAGATAAAATAGTAACTTATTTTTAAAAATAGGTTGAAT
TAGGAAATTCAAACTTCTAACATCTAAACAGATGTTAAAGTTTTTTTTTTCATTCCTAATATAAGCTATTAGTGTTGTTGGTGAAAC
CCTTTTAACATCTTATTGCATGTCGAAGTGAGCTCAACAGTGGCAGATCCAAAAATTTTATATAAGGGTATTGAACATTATATAAT
AAATACACTAAAACATATTTAAAAAATATATCGACGTTTAATCGATGCTTCAATAACATTCGCTACATTTGTAGCAACAAAGAAACA
TCTATAATTTCCACGTGATTTTTTGTAATGTAAATATGTAGATTTTTATGGAATGTTGTTGAGAGTAGAAGTTTTGACCAATGACTT
TGTTGCATTTTTTTCTCTAAATATTTGTTAGATAACAAATGAGGGTTAGGAAATAAAGTAGGGTTTATAGAATGATTTTTTTTTCTC
TTTTTAAAAATTATATTCCTTTTACGAAATCATTTGAAATGAAAATTATTGATATTTGAAATAAAAACTATTTCAAAAAAATAATTGTC
ATAAGTAAGAATCAATTTTTTTTTAGGGCACAACCACTACCTCCCAACTAAAATTTAATTAAAATAAAGTATTATTTAATATATATTG
TAATCTGACACTTCAAAATTAATATTAAAATACAATAATTGAGAATGTGAGAGGCACGTGTCCCTTTCGCCCCTTGAGCTCAAAAC
ATTTAAGTTTGGTTTGATTTAGTTTTCTAGATTTTAATAATAAGTAGCGTTAATCTATAAGCTTAACTATTTAAAAAAAAAAGTAAAA
AAGTTATCAAACAACACCCTTAATTTGTTGATTTCATGCACTGACCCACAGGGACACAGCAAATTATCCACCATTGATGAAGTCA
AGCAAGCTTTGCAATTCACTCAAGTATCTAGCTCAAGTGTATCTAGGGTAAGTTAACCTTTTAAGCACTCGTTTGTTTTTTTAAAG
TCTTCCATAAAACTTATATGCTATTCATTTTTTTCATTTAAGGATTGAGATCCATGAAATAATATATAAATATATCATTTGATGGGTC
AAATTGGTGAAAGTAAGAAGTAAGGCAGCTGATGTATTACAGCAGTACTGGAAAATTTTCCATATGTCGTTTTTCTCTATAGAAAA
TGATTAACTAAGAAGTGTGTATTGTTAATTGTAGATTTGATCTTCAAAATGGTATACAAGATCCTTATGAAGAATGTATCGTTGCT
ATGAGATTATACAAGAGAATGAGATCACAAGTTCATAGGAAAGAGAACTATCCAATGGCTTCTGACCCACAAAACAAAAATAATT
TTGCTATTTGGAGGGAAAATGAGCTTCAAAGGATGAGTCCAGAACAAATGTTGGAGATTTCTAGGTCTGATTATTATTGTTGGTG
CATGGATTTGAGGATTTGA
SEQIDNO: 265
MDHPCETLRHKCEGCFKQFNKIEHLVEHMRISFHSIHEPICSFCHKHFRYFESLREHLIGPLPKQECKNIFNARGCKICLAMFESPLQL
NLHQESCQLRPINFSHENRARLGKTESGGTKGNNEAVALSCTMVGAGIDGSLNICVRVCVVDQNESLIFSTYVNPTLPITNYRYEFTG
VRPEHLRDAMPLKQVQKKIQEFLCNGEQMWKIRPGSTGRARILVGHGLQEYLTSLQIDYPPIMIRDTAKYPPLMKTSKLSNSLHCLTQ
TYLGYSMENGKRLEGYEECVATMRLYMRMKSQVHKREEYPLASDPQNKFNFANWKQLELEKMTPQQLLQISRSDYYCWCLDSTL
SEQIDNO: 266
ATGGATCATCCATGTGAAACTTTAAGGCACAAATGTGAAGGTTGCTTCAAGCAATTCAACAAAATAGAGCACTTAGTAGAGCATA
TGAGAATCTCATTTCACTCAATTCATGAACCAATTTGCTCCTTTTGCCACAAACACTTCAGATACTTTGAATCTCTTAGAGAACAT
CTTATTGGGCCATTGCCAAAGCAAGAATGCAAAAACATATTCAATGCAAGAGGATGCAAAATCTGCTTAGCCATGTTTGAGAGTC
CACTCCAGCTCAACCTTCACCAAGAAAGTTGCCAACTTAGGCCTATAAATTTTAGTCATGAAAATAGGGCACGTTTGGGGAAGA
CAGAAAGTGGTGGAACAAAAGGCAATAACGAAGCAGTGGCATTGAGTTGCACCATGGTGGGCGCTGGCATCGACGGCTCCCT
AAATATTTGCGTTAGGGTTTGTGTTGTTGACCAAAACGAGTCCCTCATCTTTTCTACTTATGTCAACCCAACCCTTCCCATCACAA
ACTATAGGTATGAATTCACAGGTGTTCGTCCAGAACACTTGAGAGATGCAATGCCATTGAAGCAAGTCCAGAAGAAAATTCAAG
AGTTTCTATGCAATGGAGAACAAATGTGGAAGATTCGTCCTGGATCTACTGGAAGAGCAAGAATTCTTGTGGGTCATGGCCTTC
AAGAATACCTTACATCTTTGCAAATTGACTACCCTCCCATTATGATCAGGGATACTGCTAAATATCCACCATTGATGAAGACAAG
CAAGCTAAGCAATTCTCTCCACTGTTTGACACAAACATATCTTGGATACAGTATGGAAAATGGGAAGAGATTAGAAGGTTATGAG
GAGTGTGTTGCAACAATGAGATTGTACATGAGAATGAAATCTCAAGTTCACAAAAGAGAGGAATATCCATTGGCTTCTGATCCAC
AAAATAAGTTTAATTTTGCAAATTGGAAGCAACTTGAGCTTGAGAAGATGACACCCCAACAGTTGTTGCAAATTTCAAGATCTGAT
TACTATTGTTGGTGTTTGGATTCCACCCTTTAA
SEQIDNO: 267
ATGGATCATCCATGTGAAACTTTAAGGTGTGGTCTCTCTCTATTTGTGAGATATGTTTTTTGAAATATTAGTAATGAGTAACAAAG
TTTTGTTGACATTATGAACTCATTGGAATTGGGCAGGCACAAATGTGAAGGTTGCTTCAAGCAATTCAACAAAATAGAGCACTTA
GTAGAGCATATGAGAATCTCATTTCACTCAATTCATGAACCAATTTGCTCCTTTTGCCACAAACACTTCAGATACTTTGAATCTCT
TAGAGAACATCTTATTGGTAATACCTCAAACTTTCATGTTTCAAATTCATGAATTTTCAAGTTTTTCTTATTAATTTTATTTTTGTTTT
AAATGAAAAAATAGAAAGGTGTGTGGTAAGCAATTGATCTTTGTTTCTTATTCTCTATAATTTTTTTAAATCAATGTGAAAAAAAAA
TGTATAGATTATATATATATATATATATATATATATATATTGTATATCNNNNNNNNNNNNNNNNNNNNNNNNNNNNNNNNNNNNNN
NNNNNNNNNNNNNNNNNNNNNNNNNNNNNNNNNNNNNNNNNNNNNNNNNNNNNNNNNNNNNNNNNNNNNNNNNNNNNNNNN
NNNNNNNNNNNNNNNNNNNNNNNNNNNNNNNNNNNNNNNNNNATATATATATATATATATATATATATATATATTTGATATCCAT
TGATTTATATTATATTTGTTACATCCTTTTTAACAGGGAGAATGTTTCCATTTTGGTTATGGTTTTATGTAATATACAAACTTAATTA
TATTATTTAATATGACAACATTTAATTTATATAGTCTTTTTTGCTAAATTGAGCACATAAGTCGATTAACATATAAATGTGTTTATAA
CTATGTGTTATTGAAAAAAAATATTCTATTTCCTAATGTTTTCGGTTCTGCGTATAAATTTCATATTTTCAGGGCCATTGCCAAAGC
AAGAATGCAAAAACATATTCAATGCAAGAGGATGCAAAATCTGCTTAGCCATGTTTGAGAGTCCACTCCAGCTCAACCTTCACCA
AGAAAGTTGCCAACTTAGGCCTATAAATTTTGTAAGGGTTCGTCGTGTTTTACGCATTTTTTATATCTCCATGTCTTTTACTCGATT
TATGTATTTGAAAGTATATGAACTAAATGTGTTTCCAATTAAAGTTTAATGATCAAATTATAACTTTTATGAAAGTTTAAGAATTGTC
GGTATTTTTTTAACATGAAAAACTAACTTTTTAGAAAAATCTAAAAATAGGTTGCAACAAGTAACAAATTATTATCAAATAATTGATT
GAGATGCATGAAAAATTTATATTAATCAAAGTAAGCATTATATCTGATACTTGTTATATCAATTTTAAATTTAGACGTTCACAATTTT
CTAAACTATATGTATGAAAAGGAGAAATAAAACTTCACATTAATGTTAAAAGAATTTTACCCCTATTAAAAGAAAAAGAGTTTATTA
TACTCTCATGGTGCTAGAAATCTTATTTCGACTGATTGCAGAGTCATGAAAATAGGGCACGTTTGGGGAAGACAGAAAGTGGTG
GAACAAAAGGCAATAACGAAGCAGTGGCATTGAGTTGCACCATGGTGGGCGCTGGCATCGACGGCTCCCTAAATATTTGCGTT
AGGGTTTGTGTTGTTGACCAAAACGAGTCCCTCATCTTTTCTACTTATGTCAACCCAACCCTTCCCATCACAAACTATAGGTATAT
ATTCAATTTCTCCTTCTTCTTTTTTACAGTAATAACTATTGTTGTAATTTCTTCTGCTTTTTTGTTTTTGTTTTTTTTCCATTTTAATAA
AGAAACACAGTAATAAGATTATATTTAGACCCCGTCTGATAAATTTTTAGTTTTTGAAAATCCAAAGTCCTTCAAGAATTGTTTTTG
CATCTTGAAGACTACTATCTATTTATCACGAATAGTTAGAGAGTGTGATATTTTATTATATTTGTAAATAATTTGAAAAGATTTGTG
ATTTAAAACAAAATTAGGTTTTGATATTAATTAGATTGTGTGGGTGTAGGTATGAATTCACAGGTGTTCGTCCAGAACACTTGAGA
GATGCAATGCCATTGAAGCAAGTCCAGAAGAAAATTCAAGAGTTTCTATGCAATGGAGAACAAATGTGGAAGATTCGTCCTGGA
TCTACTGGAAGAGCAAGAATTCTTGTGGGTCATGGCCTTCAAGAATACCTTACATCTTTGCAAATTGACTACCCTCCCATTATGA
TCAGGTAAAATGTTTTATCCTTATTAAATATTTGACTGCATCTCAAGCTACATGCATATCCATTTTTAGGCCGTTTCTTAACAAGGA
AAATATTTTTTAACATATTTTCTCTACATTCTTAACAAGGAAAATAAAAGTCGAATTTCTAATGAATAGTAATTTATTTAAACTGCAG
GGATACTGCTAAATATCCACCATTGATGAAGACAAGCAAGCTAAGCAATTCTCTCCACTGTTTGACACAAACATATCTTGGGTAA
AGTTTTCCACATGCATAACCCCTGCCTCCCCCAATAATATTGTTATTTTTTTCTTCCTTCACTAGCTAGATACCTCAAAAGTAGTA
GTAAAAATATATATATTTGGTAACAATTTTGTTTTAGATATGAAAAATAGATATCAATCCATAAAAAAAATATATGTTAAGATGAAAG
TAGGGTTTACAAGAGTAAGTTTTTAAAATGAAAAAATAAATAGGACAGCTTAGATGATTTATTGTTAAATCAATTTAATTAAAGCTT
AAGCTGGTGGTCAACTGGGATAAGCACTTTAACAGTCCTCTCACTTTTTCTTTTTTTTTTATTTCATGGTCATGATACAGAGCAGA
AAATCAAATTGCTAATCTTCCACGATGGTAGATTTAGATAGAAAATTATATTAAATAAAAATTTAATTTTTAATATATCATGTCAAAT
CATCAATCAACTCGAATAATTAAATTAGTTAATGGATTTTGAGTAATTTAATTATATATACAATACTCTAACATTTATAAACAAATTA
AAGGTAACTAAACAAAATATTTTAGAATGTTAATCAATAAATGTATTAGAATAGATTTGTTGGAATGAATTAAAAAATTTAATAAGTT
TATAAACTTTAAACATTTTACGTCTAATTATATGGTATTGTATATTTTTTGGAATTTTGTTATTCAGATACAGTATGGAAAATGGGAA
GAGATTAGAAGGTTATGAGGAGTGTGTTGCAACAATGAGATTGTACATGAGAATGAAATCTCAAGTTCACAAAAGAGAGGAATAT
CCATTGGCTTCTGATCCACAAAATAAGTTTAATTTTGCAAATTGGAAGCAACTTGAGCTTGAGAAGATGACACCCCAACAGTTGT
TGCAAATTTCAAGATCTGATTACTATTGTTGGTGTTTGGATTCCACCCTTTAA
SEQIDNO: 268
MDSETQRNKCAACYRQFNKKEHLVEHMRISYHSVHEPMCGICGKRCRSFESLRDHLIGPLPKVECERVFRDHGCTICLTVLNSPNSL
RVHQDRCQLSRGNNGVLHRFANMGIHDDLRIDSGKTRAVALACKMVGGGSDGSLDLCARVCIIDEYENILFHSYVKPQLPVTNYRYE
TTGVRPEYLRDAMPLRHVQRKIQDFLCNGEPIWKIRSRGGKARILVGHGLEHDMKCLELEDTAKYPPLMKTSKLSNSLKYLTKSYLGY
DIQNGIQDPYDDCVATMRLYRRMRSQAHRMEDYPLATDSQNSNNFASWRQGELERMSPNELLAISRSDYYCWCLDSKDVA
SEQIDNO: 269
ATGGATTCAGAGACCCAAAGGAACAAATGTGCAGCATGCTATAGGCAGTTTAACAAAAAGGAGCACTTGGTGGAACACATGAG
GATTTCATATCACTCGGTTCATGAACCCATGTGTGGAATTTGTGGGAAACGTTGTCGCTCATTTGAATCTCTCCGTGATCATCTT
ATAGGACCATTGCCAAAGGTTGAATGTGAAAGGGTGTTTAGAGACCATGGATGTACCATTTGCTTAACCGTCCTTAATAGCCCA
AACTCTCTAAGGGTTCACCAAGATAGATGTCAACTATCACGTGGAAATAACGGTGTACTACATAGATTTGCTAACATGGGAATTC
ATGATGACTTGAGAATCGATAGTGGGAAAACAAGGGCAGTTGCACTTGCTTGCAAAATGGTTGGTGGTGGAAGTGATGGTTCTT
TAGATCTTTGTGCAAGAGTTTGTATCATCGATGAATATGAGAACATACTCTTTCATTCATATGTTAAGCCACAACTTCCCGTTACA
AACTATAGGTATGAGACAACAGGCGTTCGACCAGAGTACCTTAGGGATGCAATGCCACTAAGACATGTACAAAGAAAAATTCAA
GATTTTTTGTGTAATGGGGAACCAATATGGAAGATTCGCTCGAGAGGTGGAAAGGCGAGGATTCTTGTAGGACATGGTTTGGAA
CATGACATGAAATGTTTGGAACTTGAGGATACAGCAAAATATCCACCACTAATGAAGACAAGCAAGCTCAGCAACTCACTCAAGT
ACCTAACAAAATCTTACCTAGGGTATGATATTCAAAATGGGATACAAGATCCTTATGATGATTGTGTTGCAACGATGAGACTTTAT
AGAAGAATGAGATCACAAGCTCATAGAATGGAGGATTATCCTCTGGCTACAGATTCCCAAAACAGTAATAACTTTGCTTCATGGA
GGCAGGGTGAGCTTGAGAGGATGAGTCCTAATGAATTGTTGGCAATCTCAAGGTCTGATTACTATTGTTGGTGCTTAGATAGCA
AAGATGTGGCTTAAAATGAAGGGAAGAACAAGGAAAATATTTTAGTGGGTGAAAAAAAATAGCTAAACTTATTTGAAACTAATAAA
ATATAAATGGAATAAACATGGATACACATATATGTTTG
SEQIDNO: 270
ATGGATTCAGAGACCCAAAGGTAGTAACCATATATAAAATACAAAATATAAAATATACTCACATTGTCATAGAAAAACTAACACAC
AAGTTCTTGAAAATACTACATTTTGATCTTATTATTAACATGTTTTTCTTGTTTACTAGGAACAAATGTGCAGCATGCTATAGGCAG
TTTAACAAAAAGGAGCACTTGGTGGAACACATGAGGATTTCATATCACTCGGTTCATGAACCCATGTGTGGAATTTGTGGGAAA
CGTTGTCGCTCATTTGAATCTCTCCGTGATCATCTTATAGGTATTACATTACTATTATTATATATTTTAACTACTATACTCTATACAT
TTATGGATATTTAGTTATTTACTTATATTAATTACTTCTTTAATTCTCAGGACCATTGCCAAAGGTTGAATGTGAAAGGGTGTTTAG
AGACCATGGATGTACCATTTGCTTAACCGTCCTTAATAGCCCAAACTCTCTAAGGGTTCACCAAGATAGATGTCAACTATCACGT
GGAAATAACGTAACAAATCATATCCTTAAACTTACAAAAAATCATTTTTTTGATGTATATATATATGTATAATTATAATTAATCATAT
ATGTTCCAGGGTGTACTACATAGATTTGCTAACATGGGAATTCATGATGACTTGAGAATCGATAGTGGGAAAACAAGGGCAGTT
GCACTTGCTTGCAAAATGGTTGGTGGTGGAAGTGATGGTTCTTTAGATCTTTGTGCAAGAGTTTGTATCATCGATGAATATGAGA
ACATACTCTTTCATTCATATGTTAAGCCACAACTTCCCGTTACAAACTATAGGTGCTATATATTTTGCCATAGTTTTAATTTTTTTAA
GGGTCTATAGACATATAATCATATAAATATATAAAGTTACTCTTTGCCATCTTTTCCTACGTATGTATATATAATCTTATTTAATTAA
AAAAATTCATAGGTATGAGACAACAGGCGTTCGACCAGAGTACCTTAGGGATGCAATGCCACTAAGACATGTACAAAGAAAAAT
TCAAGATTTTTTGTGTAATGGGGAACCAATATGGAAGATTCGCTCGAGAGGTGGAAAGGCGAGGATTCTTGTAGGACATGGTTT
GGAACATGACATGAAATGTTTGGAACTTGAGTATCCTTTAGTAAAGATAAGGCATGTATCTTTAAGGAATTTATTATTACTATCAT
CTACTTTAATAACTTATGAACTAAGAGTAATATGCACTTGTTATTTGATAGGGATACAGCAAAATATCCACCACTAATGAAGACAA
GCAAGCTCAGCAACTCACTCAAGTACCTAACAAAATCTTACCTAGGGTAATAGATATTCATATATTGCCTTTATTTTTAAAAGTTT
GACATGTACATGTGAATTTGTGATATGTTACTTATTGTTAGTGATGGAATTTCTTATTTTATAGGTATGATATTCAAAATGGGATAC
AAGATCCTTATGATGATTGTGTTGCAACGATGAGACTTTATAGAAGAATGAGATCACAAGCTCATAGAATGGAGGATTATCCTCT
GGCTACAGATTCCCAAAACAGTAATAACTTTGCTTCATGGAGGCAGGGTGAGCTTGAGAGGATGAGTCCTAATGAATTGTTGGC
AATCTCAAGGTCTGATTACTATTGTTGGTGCTTAGATAGCAAAGATGTGGCTTAAAATGAAGGGAAGAACAAGGAAAATATTTTA
GTGGGTGAAAAAAAATAGCTAAACTTATTTGAAACTAATAAAATATAAATGGAATAAACATGGATACACATATATGTTTG
SEQIDNO: 271
MEEFEPNHLKTPMVSTSTRHKCAACFQQFKKKENLVEHMKKSYHSVHQPKCGVCHKHCKSFESLREHISGPLAKAHCSSIFAQNGC
HLCLKVFESPVSVDEHKELCLLTAPPPLGTMNIPYTEYEALEDENYMSKYPEAVAINCQMVGCGIDGSVDLLARVCLVDEEDNMIFHT
YVEPQLSVTDYRYEVTGITEEQLKRDGMSVKEVREKISQILYNGESIGKARLDGGKAKLLVGHNLDHALDCLLMNYPENLLRDTATYR
PLLKTNFMSHSLKYLTKTYLGYDIRSGSHDTFQDCVSVMRLYKRMRSQEHQDEETAKQNHLNFDARKSKDHDLQNMSPDELFRISTS
NYQCWCLDSQPRTAEFYGV
SEQIDNO: 272
GGCGATTGTGTTTTGTCCACCGTTACCAACCAGAGCCCTCTCTTGATCAAACCCAAACCCTAATTCCACAAATAAAAACTCCGCT
CTGCATTGTTTACGGCGATTCCGGCGCTTAATTTCTTCTGTTCCCTCCATTTTGAGCCGTTGTGCAATGGAGGAGTTCGAGCCA
AACCATCTAAAAACCCCGATGGTCTCTACAAGCACAAGGCACAAATGTGCAGCATGTTTTCAGCAGTTCAAGAAAAAAGAGAAC
CTTGTTGAACACATGAAGAAATCCTATCACTCAGTGCATCAACCTAAATGCGGTGTTTGTCATAAACACTGCAAATCATTTGAATC
ATTAAGGGAGCATATATCAGGTCCATTAGCCAAAGCTCACTGCTCAAGTATATTTGCACAAAATGGTTGCCACCTTTGTCTGAAA
GTCTTTGAAAGCCCTGTTTCTGTTGATGAGCACAAAGAGTTATGCCTCCTGACTGCCCCTCCCCCCCTCGGGACAATGAATATT
CCCTACACAGAATATGAAGCCTTAGAAGATGAAAACTACATGAGTAAATATCCTGAAGCAGTTGCTATCAACTGCCAAATGGTTG
GGTGTGGTATCGATGGATCAGTTGATCTATTAGCTCGAGTTTGCCTTGTTGATGAAGAAGATAATATGATATTCCACACGTATGT
GGAACCCCAACTATCTGTAACTGATTACAGATATGAAGTAACGGGCATAACAGAAGAGCAGTTAAAAAGAGATGGTATGTCAGT
TAAGGAAGTGAGAGAAAAGATTTCTCAAATTTTGTACAACGGAGAATCAATAGGAAAAGCACGCTTGGATGGTGGAAAAGCTAA
ACTTCTTGTGGGCCATAACCTGGACCATGCTTTGGATTGCTTGTTAATGAACTATCCCGAGAATTTGTTAAGGGATACTGCGACA
TATCGTCCACTACTTAAAACTAATTTCATGAGCCACTCTCTCAAGTACCTCACCAAGACATATCTAGGGTACGATATCAGGTCAG
GGAGTCACGACACGTTTCAGGATTGTGTGTCTGTAATGAGACTGTACAAGCGTATGCGCTCTCAAGAACATCAAGACGAAGAGA
CTGCAAAACAAAACCACCTTAATTTTGATGCTCGAAAATCAAAGGATCATGATCTTCAGAACATGTCACCGGATGAACTCTTTCG
GATTTCAACTTCAAATTATCAATGTTGGTGTTTGGACTCTCAACCACGTACCGCTGAGTTCTATGGTGTTTGAAGAAACCCTAAA
CATATTTATATATCATAAAAGGAAAATGGTTTTGTTAAATATCAAAAGGAATTCACTGAAATAAAATTATACGACTGAATATTTGTA
TTGGTTCTGAAAACTTCAAAAGACGAAAAGAAAATCAGACACGAAGTGCAAGTATCTCTGCCCAAGCTCAAA
SEQIDNO: 273
GCGATTGTGTTTTGTCCACCGTTACCAACCAGAGCCCTCTCTTGATCAAACCCAAACCCTAATTCCACAAATAAAAACTCCGCTC
TGCATTGTTTACGGCGATTCCGGCGCTTAATTTCTTCTGTTCCCTCCATTTTGAGCCGTTGTGCAATGGAGGAGTTCGAGCCAAA
CCATCTAAAAACCCCGATGGTCTCTACAAGCACAAGGTTCTCTGATTTTTATCTCTTCCTTTGTATTCCTTCAATCTCCATCGTTG
CTTATATGCTTTATCAATTTACATTGCTTTCACACTGCATTTGTTTGGTTCCCGGTAATCATGTACGCATGCTAAAATTTATTACTT
TTTGTATCTGATATCATTTTCTTTAATTGGTTGACAACTTGACATATCAAAATGTTCTAAAGCTTTGCCCTTCGCCTACTTGAACTT
TTATCAAGTGTTAAAGCAGTTCACACCATGTTAGTTTATAAGATGGCTATATTAATACCTGTTTTCTCCAGGCACAAATGTGCAGC
ATGTTTTCAGCAGTTCAAGAAAAAAGAGAACCTTGTTGAACACATGAAGAAATCCTATCACTCAGTGCATCAACCTAAATGCGGT
GTTTGTCATAAACACTGCAAATCATTTGAATCATTAAGGGAGCATATATCAGGTGTGATACTTTGAGGGTGTTTGGATGTGCGGT
TTTAAAGTGATCATTGTGATTCAAGAATCAGAATCCGAATTGAAATCACAGTCATTTGATTAAAGTGAGTGATAGTGGCCTTTGGT
TCACAGAATTTGGAATTCAACTCCATTGCACTCCTGGTTTTTGCAATGAGTATGAAACTGAATTCCATTTGAATTTACAAAATCCT
TTGATCATCTGATTTTAATGTCCCATTCCATGGAATTCAATTCCTCGCATTTACTCCTTTTTCAAAATACTCAAATATCCTTTTAAC
CGTAAGTTCAATAGCAAATGTTTCTCACTCATGATTTTTCTTCCATTTTGGGCCAACCGAACTCGTGACACAATTCAATTCCTTCA
TATTCCATTTCCTTTGACAAATTCAAGTTTCTCCCAAAACATTTCTCGAACCAAACTTCCCCTTTTTAATCAGTTTTTTTATGTGCTT
CTGTTTTGTCCTACATAATTAAAATTATAATCATTTGCAAGACACTATGAAACTGTCAAATGGCAATAATCACTTTATCATCGCATC
TAAACACTCCTTTAACATAATCTATCCATTAAATTTTTCATTCTTATTTACATTTTTGTATGGATTATGTAGGTCCATTAGCCAAAGC
TCACTGCTCAAGTATATTTGCACAAAATGGTTGCCACCTTTGTCTGAAAGTCTTTGAAAGCCCTGTTTCTGTTGATGAGCACAAA
GAGTTATGCCTCCTGACTGCCCCTCCCCCCCTCGTAAGTTGATATGGAATAATCTTTTCGATGATGAGGGCATTAACGTCTTTTG
CACAAGCGAGAGATAGAGAGCAAGTCCATGTCCCATCTTTTTTGGTGGACAAGAAATGCAGTGTCATGACTCATGAGTCTCAGT
TTCAATCTAATACACTTGACTTACATTTATTTTATTAATGTCTTGCAGGGGACAATGAATATTCCCTACACAGAATATGAAGCCTTA
GAAGATGAAAACTACATGAGTAAATATCCTGAAGCAGTTGCTATCAACTGCCAAATGGTTGGGTGTGGTATCGATGGATCAGTT
GATCTATTAGCTCGAGTTTGCCTTGTTGATGAAGAAGATAATATGATATTCCACACGTATGTGGAACCCCAACTATCTGTAACTG
ATTACAGGTACTTTTGTCTTCTGTGTTGCATCTTGTTCATTTTTCTTCTAGAATTCGATGACTGCATGTTTATGTGAAAATGGGTCA
ATTCAGGTTATATTTTCTCGATAACAGGTCAAATGGGTTAAACTAAAACATTTTGCTAAAAATGGTAACATGTCAAATGGTTTAAA
AGTTTTACACTTTACAGCCTTCTAAGTTATTTCATTAAAAAAATCGGATATTGCATTTTAATATCGTCCTTGTAATTATATTTCACTT
ACTAATTCTTTACAAATCAGTTTCGGTTTTAGTGAAACTGGTTCATAAAGTTGATGTTTACATGAATTGTGAAATAGATATGAAGTA
ACGGGCATAACAGAAGAGCAGTTAAAAAGAGATGGTATGTCAGTTAAGGAAGTGAGAGAAAAGATTTCTCAAATTTTGTACAAC
GGAGAATCAATAGGAAAAGCACGCTTGGATGGTGGAAAAGCTAAACTTCTTGTGGGCCATAACCTGGACCATGCTTTGGATTGC
TTGTTAATGAACTATCCCGAGAATTTGTTAAGGTTTTCTATATTCCATTTTTTTCTCTTATCAAGTTTTTCTAATATGAAACATGTAT
TCAGTTATAGTATTGTACTTCAGTTTCTGTCTTTTTTTTTTTTTTTAAATCTACCGAATCATAGCAATGAAGATTGCTTTGAATATGA
ATGTCATTCCTATAATTGGGTAGATTTGTCCAAAGTACAAAATGTTGTAATAAGAAGAAATGAAAGTGAATTAATGGAAGTACGTT
GCTATTTCTTGCATCTAACACTTTACATTTACCTTAAAAGATCAGTATTGTTGTAGCAACTTGCCAATTCCTTGCTTTTTATAAAAT
CTAATTATTTCGGCTTTTAATGGTCAAAAAATCTGAATCAGATTTGCCATCGCTACAAAAGTTGGGGGCATCTGCTGCCTAAGCA
TAAATAAATAAATAAATTTAGATTGAGCATGTTTTTGTTCAAATGCTGTTTTTCTGTGTGTAGGGATACTGCGACATATCGTCCACT
ACTTAAAACTAATTTCATGAGCCACTCTCTCAAGTACCTCACCAAGACATATCTAGGGTAAGTTGCTTGATTAGGGTATTTATTTA
TTTTTTATTTTTATATATGAATAATCTTAACACGAATCATGAGTTTTAGCATACTTAATTTTGTTTTATCTGATCCACTTCTACTCAT
GTCACCCAAATATGGGAAATTTTATATTGGTCATGAGCTCTTTTATAGAAAATGGTTTCTAGATTACAAAATGTTCCATCAAATTA
GAAAACCATAAAAATGCCATTCAAAAAAAAAAAAAAAAAACTATAAAAATAGGAAAGTTGGTAGCAAATAATGAAATCTGAGCAAG
TGACCAACAAATAGTTGTGATTTAGTTTTCTAAAATGGGAAGGAAATAGTTACCCCTAAATTCGCCCAAACTAAGCCGTCATTATA
TGTATTATGTAATGTGAGTGGTTTCTAGATTACAAAATATTCCATCAACAAAACCTTACCCATTTGACTTGTCGGAGATAAAAGAA
TAAGATATATCCTATTGAAGCTCATTTTTCATTCTTTCTTTCTGTGTGGGGGTACCACACGTTGTCTGTACATATATTTTTTTTTTTT
AAAAAAAAAAAATTGACCAAAGTTACGACTGTCCTGTTTACTTTGAACTTATGTGATTTTTTTATAACACAACACAAATTTATGTTT
TCAGGTACGATATCAGGTCAGGGAGTCACGACACGTTTCAGGATTGTGTGTCTGTAATGAGACTGTACAAGCGTATGCGCTCTC
AAGAACATCAAGACGAAGAGACTGCAAAACAAAACCACCTTAATTTTGATGCTCGAAAATCAAAGGATCATGATCTTCAGAACAT
GTCACCGGATGAACTCTTTCGGATTTCAACTTCAAATTATCAATGTTGGTGTTTGGACTCTCAACCACGTACCGCTGAGTTCTAT
GGTGTTTGAAGAAACCCTAAACATATTTATATATCATAAAAGGAAAATGGTTTTGTTAAATATCAAAAGGAATTCACTGAAATAAAA
TTATACGACTGAATATTTGTATTGGTTCTGAAAACTTCAAAAGACGAAAAGAAAATCAGACACGAAGTGCAAGTATCTCTGCCCA
AGCTCAAA
SEQIDNO: 274
MRISYHSVHEPTCGICRKHCRSFESLREHLIGPLPKQECRDMFAYRGCKFCLKVFDSPNSRRIHQEKCQHSGTNAGIIGRFSNLGLRD
NLAISGGVRGPQVVALACKMVGGGSDGSLDLCGRVCLIDEHENIIFHSYVKPPIPVTNYRYETTGIRPEYLRDAMPMKQVQRRIQDFL
CNGEPMWTIRARGGRARILVGHGLDHDLECLQIEYRTEKIRDTAKYPPLMKTSKLSNSLKYLTQTYLGYDIQVGIQDPYDDCVATMRL
YMRMRSQIHRTQDYPLVSDPQNRNNFASWRQSELERMTPEQMLEISRSDYYCWCLDSLYP
SEQIDNO: 275
GAATGCTATACCCTACCAACAAACTCATCTGCAAGGTAGAGAGCAGAGGAAGCAAGCATGGCCAAAGATAAAGAAAAAGTAAAA
GGGGAATCCCAAATTAATATACTGAATAATTCTTAGGGAATTGTCCGTTTATGCAAGTTGGGGCAATTCTTACCTCTACCCTTTCT
CTATAAATACCATTCCACTCCACCTTTGACCTCAACTTCAACTCTTTCTTGAAAGTTATACATACATCACTATAAACAAATCATGGA
TTGCAGAATGGAGAGTGCAGAAACTCACAGGTTTTGTTTCTGACATCCATGCACACACACATCACATATACAAGCCTGCATGTG
CATCTTAACTCTCTTAACTCATAGTTAAAACACACATGGATATGTGTAATATATAGCTTTTGTTACTGTAGGAATAAGTGTGCAGC
ATGCTTCAGACAGTTCAACAAACTGGAGCACCTTGTGGAGCACATGAGGATCTCATACCATTCGGTTCATGAACCAACCTGTGG
CATTTGCAGGAAACACTGCAGGTCATTTGAGTCTCTAAGGGAACATCTTATAGGTCCATTGCCAAAGCAGGAATGCAGAGATAT
GTTTGCCTATAGAGGGTGCAAGTTTTGCTTGAAAGTCTTTGACAGCCCTAATTCTCGCAGGATTCACCAAGAAAAATGCCAACAC
TCTGGGACAAATGCTGGAATAATTGGTCGCTTTTCAAACTTGGGACTTCGTGATAATTTGGCCATTAGTGGTGGAGTAAGAGGA
CCACAAGTAGTTGCATTAGCATGTAAAATGGTTGGTGGTGGCAGTGATGGCTCACTAGATCTCTGTGGAAGAGTGTGCTTAATC
GATGAGCATGAGAACATAATCTTCCATTCTTATGTGAAGCCACCAATTCCTGTCACAAACTACAGGTATGAGACCACAGGCATTA
GACCAGAATACCTGAGGGATGCAATGCCAATGAAACAAGTTCAAAGGAGGATTCAAGACTTTCTTTGCAACGGTGAACCTATGT
GGACAATTCGAGCAAGAGGAGGAAGAGCAAGGATTCTTGTGGGCCATGGTTTGGATCATGACCTTGAATGTCTGCAAATAGAAT
ATCGAACAGAAAAGATAAGGGACACTGCAAAATACCCTCCTCTGATGAAAACGAGCAAACTCAGCAACTCGCTCAAGTACTTAA
CACAAACATATCTTGGGTATGACATTCAAGTTGGAATTCAGGATCCTTATGATGACTGTGTGGCAACTATGAGGCTCTACATGAG
AATGAGATCCCAAATACACAGAACACAGGATTACCCTTTGGTGTCTGACCCACAGAACAGGAACAATTTTGCTTCGTGGAGGCA
AAGTGAGCTTGAAAGAATGACTCCTGAACAAATGCTGGAAATATCAAGATCTGACTACTATTGCTGGTGCTTGGATTCCTTGTAT
CCCTGAATATGAGGAAGCAAGTACACAAAATCAGAACCTCATATGAACCACAGGGAATTGGTGAACACAATACCCATTCAACCG
ATATACATCAATAACTACGTACTAAAAGTAACAATAAAGTGCACCAAAGTTGTATCTTTCTACTAGTTAATAATACGCCACTTAAG
CAGAAGCTAGCCTTACACTGCTGTCATAGTGCTAGCACCTTAGAGGCATTGATGTTATGCATGAATATACTTTATTAATACAAAG
AATAATAGAGCTTTCATTAC
SEQIDNO: 276
GAATGCTATACCCTACCAACAAACTCATCTGCAAGGTAGAGAGCAGAGGAAGCAAGCATGGCCAAAGATAAAGAAAAAGTAAAA
GGGGAATCCCAAATTAATATACTGAATAATTCTTAGGGAATTGTCCGTTTATGCAAGTTGGGGCAATTCTTACCTCTACCCTTTCT
CTATAAATACCATTCCACTCCACCTTTGACCTCAACTTCAACTCTTTCTTGAAAGTTATACATACATCACTATAAACAAATCATGGA
TTGCAGAATGGAGAGTGCAGAAACTCACAGGTTTTGTTTCTGACATCCATGCACACACACATCACATATACAAGCCTGCATGTG
CATCTTAACTCTCTTAACTCATAGTTAAAACACACATGGATATGTGTAATATATAGCTTTTGTTACTGTAGGAATAAGTGTGCAGC
ATGCTTCAGACAGTTCAACAAACTGGAGCACCTTGTGGAGCACATGAGGATCTCATACCATTCGGTTCATGAACCAACCTGTGG
CATTTGCAGGAAACACTGCAGGTCATTTGAGTCTCTAAGGGAACATCTTATAGGTAATAATAATCTTTCTTATTAATTGTTGAGCA
AATTGAAGTTGATGGAGTTTCATATTTTTTGAATAGATAATGATCTATTGATTGATGATCATTGTGAATTTTTTATAAATCTGCTTTT
CCAGGTCCATTGCCAAAGCAGGAATGCAGAGATATGTTTGCCTATAGAGGGTGCAAGTTTTGCTTGAAAGTCTTTGACAGCCCT
AATTCTCGCAGGATTCACCAAGAAAAATGCCAACACTCTGGGACAAATGCTGTAAAACTTTTGACTTTGAATTTCCTGTTACATG
ATAAAAAAATATGTGCAGTTAATATACATGGAAACAAGAATTGTATATTTTTTATTATTAATGCTAAAAATTGAAAATGTTTTGGAAT
TATTCATTGCGAATTCCTAACTTTTGGTGCACATTATTACAGGGAATAATTGGTCGCTTTTCAAACTTGGGACTTCGTGATAATTT
GGCCATTAGTGGTGGAGTAAGAGGACCACAAGTAGTTGCATTAGCATGTAAAATGGTTGGTGGTGGCAGTGATGGCTCACTAG
ATCTCTGTGGAAGAGTGTGCTTAATCGATGAGCATGAGAACATAATCTTCCATTCTTATGTGAAGCCACCAATTCCTGTCACAAA
CTACAGGTTGGACAATTAAACTTAGTTTTTGGAGAGTTTAACCTTATATATATATATAGCTGGTGTAGTGAATGGAGCTACTGATT
CATTGACAGGTATGAGACCACAGGCATTAGACCAGAATACCTGAGGGATGCAATGCCAATGAAACAAGTTCAAAGGAGGATTCA
AGACTTTCTTTGCAACGGTGAACCTATGTGGACAATTCGAGCAAGAGGAGGAAGAGCAAGGATTCTTGTGGGCCATGGTTTGG
ATCATGACCTTGAATGTCTGCAAATAGAATATCGAACAGAAAAGATAAGGTAAATCATTCAATTTCAAATTTAGGTTGTCTATCAT
ACATATCTCAGTCAAACATTCTCTTCAGAAATACTTGTAACTTCATTTATGGTAAGTTAAATAACACTTTTCATTAGACCCTACGGG
TTACAGTGACAAAGAAGACATCTTGTTCTTGTTGTATAACTTAATTTGTTGATTTGAAGTGCTTTAATCATCCCTGAAACTAATATA
TGGTGTAGAACAAGCACATATAGGTTTACTACTTTAACACTCATATTCAAATATTGACATAAAAGTCCTTATTGAATAATCAGGGA
CACTGCAAAATACCCTCCTCTGATGAAAACGAGCAAACTCAGCAACTCGCTCAAGTACTTAACACAAACATATCTTGGGCAAGTA
TCTTTTACAATTTTCTTACACAAGATGCAATTTTTATGGAGAATGTTTGAAGATTTTGAGGAACATATGCATGCAGGTATGACATT
CAAGTTGGAATTCAGGATCCTTATGATGACTGTGTGGCAACTATGAGGCTCTACATGAGAATGAGATCCCAAATACACAGAACA
CAGGATTACCCTTTGGTGTCTGACCCACAGAACAGGAACAATTTTGCTTCGTGGAGGCAAAGTGAGCTTGAAAGAATGACTCCT
GAACAAATGCTGGAAATATCAAGATCTGACTACTATTGCTGGTGCTTGGATTCCTTGTATCCCTGAATATGAGGAAGCAAGTACA
CAAAATCAGAACCTCATATGAACCACAGGGAATTGGTGAACACAATACCCATTCAACCGATATACATCAATAACTACGTACTAAA
AGTAACAATAAAGTGCACCAAAGTTGTATCTTTCTACTAGTTAATAATACGCCACTTAAGCAGAAGCTAGCCTTACACTGCTGTC
ATAGTGCTAGCACCTTAGAGGCATTGATGTTATGCATGAATATACTTTATTAATACAAAGAATAATAGAGCTTTCATTAC
SEQIDNO: 277
MRFDLPFDMDAEADSSQNPTPRHKCSACYKQFKKKEHLIEHMKTSNHSVHQPACGVCQKHCKSFESLREHLTGPLPKGVCSKTFS
QRGCQLCLVLFDSPGSLIAHRQTCRLSAPTRLGTKDLTYIDSQFDCQDSSDENHAGRGTGGTVAMDCEMVGGGSDGSLELCARVCL
VDEDENLIFHTYVRPLMTVTNYRYDITGLTEEHLRNAMPLYEVREKVLKILYNGESIGKVRLNGGRAKLLVGHDLAHDLDCLNMNYPD
HMLRDTAKYRPLMKTNLVSHSLKYLTRTYLGYDIQSGTHDPYEDCISVMRLYKRIRAQIHPEEEEDHGTSTPSNRIVGMPDCWRSKEL
DNLTPDQLYAMSRSDYKCWCLDLRSKLPT
SEQIDNO: 278
AAATATTAGTTTAATTGAATGTTAAATTAAAAGTATACCAAATCAGGATTTGATTTGTGATATTTGGTTTGGGGTGACTGCTCCACT
TGCTGCCTACACAGTAGCACGGTGCGTCTTGACTCAAAGCAGTGGTTGCAGCTTCTTCTTTGGTGGTGTTAGGGTTTTGGAGTA
GCCGTTTACACCATCGAAATTTTCGTGTACCTATGTACGACAAAATGTTGTGATTCTTCTATCGACTCCTCTCGCTAACAGGCAA
AATACAAGTCGTTTCATCGTATCTGCGTCACACCAAACCTAGCTGTGCATGCGTTTTGATTTACCATTTGATATGGACGCCGAAG
CGGACTCAAGTCAAAACCCTACTCCAAGACACAAATGTTCGGCATGCTATAAACAATTCAAGAAGAAAGAGCATCTAATTGAGCA
CATGAAAACCTCGAACCATTCCGTCCATCAGCCTGCGTGTGGAGTCTGTCAAAAACACTGCAAATCTTTTGAGTCTCTGAGGGA
ACATCTTACTGGTCCTTTGCCAAAAGGAGTTTGTTCAAAGACTTTCTCTCAACGGGGCTGTCAACTTTGCTTGGTACTATTTGATA
GTCCCGGGTCTCTCATTGCTCACAGACAAACATGTCGCTTGTCTGCTCCTACTCGTCTTGGAACTAAAGATCTGACCTACATAGA
TTCCCAATTTGACTGTCAAGATTCTTCTGATGAAAACCATGCTGGCAGGGGCACTGGAGGAACAGTTGCAATGGACTGTGAAAT
GGTTGGTGGTGGAAGTGATGGTTCTCTGGAACTTTGTGCAAGAGTATGTTTGGTTGATGAAGATGAGAACTTAATCTTTCATACA
TATGTAAGACCTTTAATGACTGTTACTAATTACAGATATGATATAACTGGGTTGACAGAAGAACATCTCAGAAATGCGATGCCCC
TTTATGAAGTTCGAGAAAAGGTATTGAAAATACTATACAATGGAGAATCCATTGGCAAAGTTCGACTAAATGGTGGAAGGGCCAA
GCTTCTTGTGGGGCATGACTTAGCACACGATTTAGATTGCTTGAACATGAATTATCCTGATCATATGCTAAGAGACACTGCAAAG
TACCGTCCGTTGATGAAGACAAACTTGGTCAGCCATTCGCTCAAGTATCTCACCCGAACATATCTTGGTTATGATATCCAATCCG
GCACTCATGACCCGTATGAAGATTGTATTTCTGTGATGAGACTATACAAAAGAATTCGAGCTCAAATTCATCCAGAGGAAGAAGA
AGACCATGGAACATCGACTCCGAGTAACAGGATTGTTGGCATGCCTGATTGCTGGAGATCCAAGGAACTTGACAACCTCACTCC
AGATCAACTCTATGCCATGTCAAGATCGGATTACAAGTGTTGGTGCTTGGATTTGAGGTCAAAATTGCCAACCTGAATTTATTTC
ATCATTAAATTTGTCCGCAGCATCATATCATAATGCTTATTTCTTCAGAAACTATGGGAATGGGCTGCTAAAATATTTTGCAGTGA
TATTTTCAGTGCATATCTTTCTAACGCATCGTGTGATGCTCGGGACAAGAAAACTGTTGAGAAAAAGATAGGTGGTTATGATGCT
TTTGTGAATATCTAACTTTTGGTTCAAACCAAATAAAGGCGACCTTTTTTAGAATCAAGACTTTCCTACCTTTCTCATCATAATAAA
GGCTACCGACACAAACGTAAACTGATTTAAGGCTTGTTCTAGATCCAATTTCAACGGAGCCACTTAGATCTAAGTTGCTGATTGG
TACAAAGAGTTTTCATTTTCAAATATAAACATGTTAAGTTACTATTTAGTTTCCTTTCAAGAAATATATTTTCTTTCTTTACGA
SEQIDNO: 279
AAATATTAGTTTAATTGAATGTTAAATTAAAAGTATACCAAATCAGGATTTGATTTGTGATATTTGGTTTGGGGTGACTGCTCCACT
TGCTGCCTACACAGTAGCACGGTGCGTCTTGACTCAAAGCAGTGGTTGCAGCTTCTTCTTTGGTGGTGTTAGGGTTTTGGAGTA
GCCGTTTACACCATCGAAATTTTCGTGTACCTATGTACGACAAAATGTTGTGATTCTTCTATCGACTCCTCTCGCTAACAGGCAA
AATACAAGTCGTTTCATCGTATCTGCGTCACACCAAACCTAGCTGTGCATGCGTTTTGATTTACCATTTGATATGGACGCCGAAG
CGGACTCAAGTCAAAACCCTACTCCAAGGTCAAACTGCTGCGCTTCACTTTTAATCTTTCTTTTGTTTTTGTTTGTTCCATCATGG
TTGATTACCGTATTGCGTTGATCAGAAAGTCGAACCTTGTAATGAAAGAATTTAGAAGGATTTTAAAATCAAATCCAAATTTATTG
TGTTTTTAAATTAGTTATTACTGCATTTTGTTCTCTGTTGTTTTTTAGAAGATTCTCTTGTGTGAACGAATATTCTGGTTAGTTTTTA
ATCGGTTTGTGGGGACTCTAATGTGTATCTGATATATATAATTGCCTGAGTTTTCTATTTACAGTGACTAATTAGTATCTGCAATAT
AGTGATTGAGGAAATGTTCCGTGCTTCTGAGTAGAATAATATATATTGAACCAGTGCACTAAGTTTTTTTTATTCCTCTGGTATAA
CTGTTCTTTTGCTAGTTTGTTTGAAGAATAGCTGGTTTCTTCCTACAGACACAAATGTTCGGCATGCTATAAACAATTCAAGAAGA
AAGAGCATCTAATTGAGCACATGAAAACCTCGAACCATTCCGTCCATCAGCCTGCGTGTGGAGTCTGTCAAAAACACTGCAAAT
CTTTTGAGTCTCTGAGGGAACATCTTACTGGTAAGTCATTTGTGCATTCAATCTGTGCTGTCGACACTGTTTATTGCTTCCATGTT
TTATGCTCATTGTTTATATTTTCTTGTTCCTTTTTTAACTATGATTTAGGTCCTTTGCCAAAAGGAGTTTGTTCAAAGACTTTCTCTC
AACGGGGCTGTCAACTTTGCTTGGTACTATTTGATAGTCCCGGGTCTCTCATTGCTCACAGACAAACATGTCGCTTGTCTGCTC
CTACTCGTCTTGTAAGTTGATAATTGACAACCTTGAGCATTTATAAAATGAATAGGTTTCTTGTATAATTTGTTATCTATTGGGATT
GAGATTAGGAAGTTTATGTTATGTCTGGAACTGTTGCAGGGAACTAAAGATCTGACCTACATAGATTCCCAATTTGACTGTCAAG
ATTCTTCTGATGAAAACCATGCTGGCAGGGGCACTGGAGGAACAGTTGCAATGGACTGTGAAATGGTTGGTGGTGGAAGTGAT
GGTTCTCTGGAACTTTGTGCAAGAGTATGTTTGGTTGATGAAGATGAGAACTTAATCTTTCATACATATGTAAGACCTTTAATGAC
TGTTACTAATTACAGGTACTTTTAATTTGCTTCTTTGTTTTCTTTTCTTTTACAAATTACGTTTTTTAGGTTTGATAGGGAGAAGGAA
ATGTAAAGGAGGGAGATAGGATAGAAATATCAATGTTTCACTATTTTTTTGGGAGCAGAAATAGGGACGAGGAAGTCTTTCGTAT
GGGACCCTTCTCTCAAATTGGCATGAAATAGGGGGGAGAGATCATGTCTATTTTTCATTTTTTTTTTCGGACTTTCTTGAAAAGTT
AACTAACGTTTTTATGACAAAAAAATATAAATAATAAATAATAAATAATTTAATGTTGAGAATAATAGAGATAAATATATATTTTTTG
GATTAAATTAGTACAAGGATATTTCATATAATTTATTTACTTTTCATTCTCTGTTTCAATCATCTAAACAAATGAGGCAAATTTCTCC
ACTTCTCTTATTTTTATCAACCCAAACAAACAACATATTTTTCAACTACATTTATCTTTATTTCTATCCTTCATATTTCTTTATTCATT
TCTATTCCCAAAATCGCATTATTCTCAATGAAAATTGAGAAAGGGAAAAGAGTGTAGGGGTTGATTTTATTTCCATATTTTCAGAT
ATGATATAACTGGGTTGACAGAAGAACATCTCAGAAATGCGATGCCCCTTTATGAAGTTCGAGAAAAGGTATTGAAAATACTATA
CAATGGAGAATCCATTGGCAAAGTTCGACTAAATGGTGGAAGGGCCAAGCTTCTTGTGGGGCATGACTTAGCACACGATTTAGA
TTGCTTGAACATGAATTATCCTGATCATATGCTAAGGTAGATTCTTCTTGAGTAACTTAAATTGTGCTAAATCTTGCTCGGCAGAA
TTATTCTTGACCACACTCTTGCACTAATTTTTCCACTTTAAGGATTTATCATGATGATGAACTAAACAATTGTTAGAAATCCCTGAA
TTTCTTCTGTTTTTCTCCTTTTTATTATCATCTTATATAAGGTATTATGCTAAACATGTTTCCAGACTTAAAAGATCTATCTATTCAG
AACCTTTTTTCATTATTATATTGGATCATGCCCAGATTGATGGAAATATCTCCTTGAATGTACTGTTTGTTGTTCGAGAGCAGATC
TTTGTAATTATTGCACTCATCTTTTGCCTATGCTTTTATGTTGCATTGAAGAGACACTGCAAAGTACCGTCCGTTGATGAAGACAA
ACTTGGTCAGCCATTCGCTCAAGTATCTCACCCGAACATATCTTGGGCAAGTTAATTCTTAACTCAAATCTTTTTCTGTTTGAAAC
TTCTTCTTCCAGCTTATAGTTTTCCTTGTATTTTAAAAGTCAAATTACAATTGTTCAATGGCTATCATTTCAATTTGCCCAGGATCA
TTGTAGATTCTATGAATGATACTTCTTTCTATACTAAAACAAAATGAAATTGGTGATCAACATTTTTTTATGTTGAGTACGACTAAA
CTAATTTTGAAGGACGTATTCATGTTGATTGTCAAATATAAAATGTTATAAACTAAAACAAGTTTAGTTATAAGGTTTTATTTTTTTG
TGGTTTTTACTCTTCACATTTCGGTACCAAATTTTAAATCCAAACATCCTATCCTGAATCAATGAGACAACAGTGGTGGTGGTGGT
GGTCTGACGGTGCTAACGAGGGAAATTGTGACGACAGTGGTAAACTGGTGGCAATTAGGAGGTGGTGGGTGATAGTTCTAGTG
ATGACAGTTTACATGGATGGTTGAGGAGGGATGCGAGATACTGAATAGCTTGTTCTTCATTTCTTTATACTAAAAGCCATCATAA
AGCAAAACCTTATTTTTAAAGGCAGATAAAAGTATTTCAAAACCAACTAAAAATCAATTCAGCTCCATTTTAGTCAAATGAATTTTG
TTTTGAATTTTTATTTGAAAGTCCAAATTTAAATACTTACCTGTTTAATCTTAAAATTACGATAGTTAACTGATGACAATAATTTTCT
ATTGTTTTTGCTTTACAGTTATGATATCCAATCCGGCACTCATGACCCGTATGAAGATTGTATTTCTGTGATGAGACTATACAAAA
GAATTCGAGCTCAAATTCATCCAGAGGAAGAAGAAGACCATGGAACATCGACTCCGAGTAACAGGATTGTTGGCATGCCTGATT
GCTGGAGATCCAAGGAACTTGACAACCTCACTCCAGATCAACTCTATGCCATGTCAAGATCGGATTACAAGTGTTGGTGCTTGG
ATTTGAGGTCAAAATTGCCAACCTGAATTTATTTCATCATTAAATTTGTCCGCAGCATCATATCATAATGCTTATTTOTTCAGAAAC
TATGGGAATGGGCTGCTAAAATATTTTGCAGTGATATTTTCAGTGCATATCTTTCTAACGCATCGTGTGATGCTCGGGACAAGAA
AACTGTTGAGAAAAAGATAGGTGGTTATGATGCTTTTGTGAATATCTAACTTTTGGTTCAAACCAAATAAAGGCGACCTTTTTTAG
AATCAAGACTTTCCTACCTTTCTCATCATAATAAAGGCTACCGACACAAACGTAAACTGATTTAAGGCTTGTTCTAGATCCAATTT
CAACGGAGCCACTTAGATCTAAGTTGCTGATTGGTACAAAGAGTTTTCATTTTCAAATATAAACATGTTAAGTTACTATTTAGTTT
CCTTTCAAGAAATATATTTTCTTTCTTTACGA
SEQIDNO: 280
MDCRIESAETHRNKCAACFRQFNKLEHLVEHMRISYHSVHEPTCGICRKHCRSFESLREHLIGPLPKQECRDIFSYRGCKFCLKVFDS
PNTRRIHQEKCQHSATNAGIIGRFSNLGLRDNFAISGGARGPQVVALACKMVGGGSDGSLDLCGRVCLTDEHENIIFHSYVKPPIPVT
NYRYETTGIRPEYLRDAMPMRQVQRRIQDFLCNGEPMWTIRARGGRARILVGHGLDHDLESLQIEYRTEKIRDTAKYPPLMKTSKLSN
SLKYDIQAGIQDPYDDCVATMRLYMRMRSQVHRTQDYPLVSDPQNRNNFASWRQSELERMTPEQMLEVSRSDYYCWCMDSLYNP
SEQIDNO: 281
ATGGATTGCAGAATAGAAAGTGCAGAAACTCACAGGAATAAGTGTGCAGCATGCTTCAGACAGTTCAACAAACTGGAGCACCTT
GTGGAGCACATGAGGATCTCATACCATTCGGTTCATGAGCCAACCTGTGGCATTTGCAGGAAACACTGCAGGTCATTTGAGTCT
CTAAGGGAACATCTTATTGGTCCATTGCCAAAGCAGGAATGCAGAGATATATTTTCCTATAGAGGGTGCAAGTTTTGCTTGAAAG
TCTTTGACAGCCCTAATACTCGCAGGATTCACCAAGAAAAATGCCAACACTCTGCAACAAACGCTGGAATAATTGGTCGCTTTTC
AAACTTGGGACTTCGTGATAATTTTGCCATTAGTGGTGGAGCAAGAGGACCACAAGTAGTCGCATTAGCATGTAAAATGGTTGG
AGGTGGTAGTGATGGCTCACTGGATCTCTGTGGAAGAGTGTGCTTAACCGATGAGCATGAGAACATAATATTCCATTCTTATGT
GAAGCCACCAATTCCTGTTACAAACTACAGGTATGAGACAACAGGCATTAGACCAGAATACCTTAGGGATGCAATGCCAATGAG
ACAAGTTCAAAGGAGGATTCAAGACTTTCTTTGCAACGGTGAACCTATGTGGACAATTCGTGCAAGAGGAGGAAGAGCCAGGAT
TCTTGTGGGTCATGGTTTGGATCATGACCTTGAATCTTTGCAAATAGAATATCGAACAGAAAAAATAAGGGACACTGCAAAATAC
CCTCCTCTGATGAAAACGAGCAAGCTCAGCAACTCCCTTAAGTATGACATTCAAGCTGGAATTCAGGATCCTTATGATGACTGT
GTTGCAACTATGAGACTCTACATGAGAATGAGATCCCAAGTTCACAGAACACAGGATTACCCTTTGGTTTCTGATCCACAGAACA
GAAACAATTTTGCTTCGTGGAGGCAAAGTGAGCTCGAAAGAATGACTCCTGAACAAATGCTGGAAGTATCAAGGTCTGACTACT
ATTGCTGGTGCATGGATTCCTTGTATAATCCCTGA
SEQIDNO: 282
ATGGATTGCAGAATAGAAAGTGCAGAAACTCACAGGTTTTGTTTCTGACATCCATGCACAACCACACACATCACATATGCAAGG
GTGTGCATAACTCTTATAACTCATACTTAACACTCACATGGATATGTGTAAGTGACATACACATATTTTGTTACTATAGGAATAAG
TGTGCAGCATGCTTCAGACAGTTCAACAAACTGGAGCACCTTGTGGAGCACATGAGGATCTCATACCATTCGGTTCATGAGCCA
ACCTGTGGCATTTGCAGGAAACACTGCAGGTCATTTGAGTCTCTAAGGGAACATCTTATTGGTAATAATCTTTCTTAATAACTGT
GTTTACATATTCATGGTGAAAATAATTATCACTTCATCATTGTGAATTTTTTATGAGACTCAATCTGCTTTTCCAGGTCCATTGCCA
AAGCAGGAATGCAGAGATATATTTTCCTATAGAGGGTGCAAGTTTTGCTTGAAAGTCTTTGACAGCCCTAATACTCGCAGGATTC
ACCAAGAAAAATGCCAACACTCTGCAACAAACGCTGTACAATTTTTGCCTTTGAATAACTATATATTTTGCAAATGAGATATCCTC
GAAAAACATTATTCTATCTAACTAATGTTTTTCCTGTTAAATGATAAAAATATGTACTGGAGTTAATACATAAAACATGAAATGTAT
ATTCTTTTATTATTAATACTAAAAATTGAAAATATTGTAGAATTATTCATTGGGAATTTCTAACTTTTGGTGAACATTATTATAGGGA
ATAATTGGTCGCTTTTCAAACTTGGGACTTCGTGATAATTTTGCCATTAGTGGTGGAGCAAGAGGACCACAAGTAGTCGCATTAG
CATGTAAAATGGTTGGAGGTGGTAGTGATGGCTCACTGGATCTCTGTGGAAGAGTGTGCTTAACCGATGAGCATGAGAACATAA
TATTCCATTCTTATGTGAAGCCACCAATTCCTGTTACAAACTACAGGTGGGACAATTAAACTTCCTTAGGTTTTGGAGAGTTTAAC
CACATATATATATAGCTGGTGTGGTGAATGGAGCTACTGATTCATTAACAGGTATGAGACAACAGGCATTAGACCAGAATACCTT
AGGGATGCAATGCCAATGAGACAAGTTCAAAGGAGGATTCAAGACTTTCTTTGCAACGGTGAACCTATGTGGACAATTCGTGCA
AGAGGAGGAAGAGCCAGGATTCTTGTGGGTCATGGTTTGGATCATGACCTTGAATCTTTGCAAATAGAATATCGAACAGAAAAA
ATAAGGTAAATCATTCAATTTAACATTTAGGCAGAACATGCAGCATATACGTTGTCTATCATACATATCTCAGTCAAATATTCTCTT
CAGAAATACTTGTAACTTTATTTAAGGAAAGTTAAATAACACTTTTCATTAGACCCAGTGTGTAAAAACTTCACTGTTGACAAAGA
TGACATCTTGTATAATTTATTTTACTGTCACTAAGAGTGTATAACTTAATTTACTTATTTTAAGTTCTTTACTCCTCTCTGAAACAAA
TTATTGGTATAGAACAAGCACATATAGGTTTACTACTTTAATACTCTCTCATATTCAAATATTGACCTAAAAGTCCTTATTGAATAA
TCAGGGACACTGCAAAATACCCTCCTCTGATGAAAACGAGCAAGCTCAGCAACTCCCTTAAGTACTTAACGCAAACATATCTTG
GGCAAGTTTCTTTCACAATTTTCTTCACTGTAAAACACAAGATGCAATTTGATGGATGCCCATCAGCCATAAATGTTTTAAGATTT
TGGGGCACATATATATGCAGGTATGACATTCAAGCTGGAATTCAGGATCCTTATGATGACTGTGTTGCAACTATGAGACTCTACA
TGAGAATGAGATCCCAAGTTCACAGAACACAGGATTACCCTTTGGTTTCTGATCCACAGAACAGAAACAATTTTGCTTCGTGGAG
GCAAAGTGAGCTCGAAAGAATGACTCCTGAACAAATGCTGGAAGTATCAAGGTCTGACTACTATTGCTGGTGCATGGATTCCTT
GTATAATCCCTGA
SEQIDNO: 283
MDAEADSTQIPNIRHKCPACYKQFKKKEHLTEHMKTSNHSVHQPACGVCQKHCKSFESLREHLTGPLPKGVCSKIFSQRGCQLCLVL
FDSPGSLVSHRETCRLSAPTRLGTRELPCIDSQFDCLDSSDENHAGWGPGGAVGMDCEMVGGGSDGSLELCARVCLVDEDENLIF
HSYVQPQIPVTNYRYDITGLTEEHLRNAMPLYEVREKILQMLYNGESIGKVRLNGGKARLLVGHDLAHDLDCLKMNYPDHMLRDTAK
YRPLMKTNFVSHSLKYLTRTYLGYDIQSGTHDPYEDCISVMRLYKRIRAQIHPEEAHETPSHNIVCVPDSWRSRELENLTPDQLYAMS
KSDYKCWCLDLRPRLAS
SEQIDNO: 284
GATTTGATTTGTGATATTTGGTTGGGAGCACTGCTCCACTTGCTGCTTGCACAGTAGCACGGTGCGTTTTGACTCAAAGCAGTG
GTTGCATCTTCTTCCTTCGTGGGGTTAGGGTTTTGGGGTAGCTGAATTTTTCGTGTGCCCGACGATACGAGAAAATGTTGGGAT
TCTTCTATTGACGTTCCATCGTATATGCGCCACACCAAACCACGCTTTGCATGCGTTTGATTTACCATTTGATATGGACGCCGAA
GCGGACTCAACTCAAATCCCTAATATAAGACACAAATGCCCGGCATGCTATAAACAATTCAAGAAGAAAGAGCATCTAACTGAG
CACATGAAAACCTCAAACCATTCCGTCCATCAGCCTGCATGTGGGGTCTGTCAAAAGCACTGCAAATCTTTTGAGTCTCTGAGG
GAACATCTTACTGGTCCTTTGCCAAAAGGAGTTTGTTCAAAGATTTTCTCTCAGCGGGGCTGTCAACTTTGCTTGGTACTATTTG
ATAGTCCCGGGTCTCTCGTTTCTCACAGAGAAACATGTCGCTTATCTGCCCCTACTCGTCTAGGAACACGAGAACTGCCCTGTA
TAGATTCCCAATTTGACTGTCTAGATTCTTCTGATGAAAACCATGCTGGCTGGGGCCCCGGAGGAGCAGTTGGAATGGACTGTG
AAATGGTTGGTGGTGGAAGTGATGGTTCTCTGGAACTTTGTGCAAGAGTATGCTTGGTTGATGAGGATGAGAACTTAATCTTTCA
TTCATATGTACAACCTCAAATACCTGTTACCAATTACAGATATGATATAACTGGATTGACAGAAGAACATCTCAGAAATGCCATGC
CCCTTTATGAAGTTCGAGAAAAGATTTTGCAAATGCTATACAATGGAGAATCCATTGGCAAAGTTAGACTAAATGGTGGAAAGGC
CAGGCTTCTTGTGGGGCATGACTTAGCACACGATTTAGATTGCTTGAAAATGAATTATCCTGATCATATGCTAAGAGACACTGCA
AAGTACCGTCCTTTGATGAAGACAAACTTCGTCAGCCATTCGCTCAAGTATCTCACCCGAACATATCTTGGTTATGATATCCAAT
CCGGCACTCATGATCCGTATGAAGATTGCATTTCTGTCATGAGACTATACAAGAGAATACGAGCTCAAATTCATCCAGAGGAAG
CCCATGAAACACCGAGTCACAACATTGTTTGCGTGCCTGATAGCTGGAGATCCAGGGAACTTGAGAACCTCACTCCAGATCAG
CTCTATGCCATGTCAAAATCGGATTACAAGTGTTGGTGCTTGGATTTGAGGCCTAGATTGGCATCCTGAATTGTTTTATCATTGC
ATTTCTCCACAGCATCATATCATAATATGCATATTTCTTCAGACACTTTGAAAATGGGGTGGTAAAATGTTTTGCAGTGATATTTTC
AGTGCTTATCGCATAGTCTGGTCCTCGGATCAAGAAAAATATTGAGCAAAGACAGGTGTTTGATTATGATGCTTTTGTAAATATAT
CTAACTGTTTGTTCAAACCAAATAAAGGCTACCCTTTTTAGAATGAAGACTTGCCTACCATAATAAAGGCTACCGACACAAACATA
AATGGATGTAAGGTTTGTTCTAGATCCAATTTCAACGGAGCCACTTAGATCTAAGTTGCTGATTGGAAC
SEQIDNO: 285
GATTTGATTTGTGATATTTGGTTGGGAGCACTGCTCCACTTGCTGCTTGCACAGTAGCACGGTGCGTTTTGACTCAAAGCAGTG
GTTGCATCTTCTTCCTTCGTGGGGTTAGGGTTTTGGGGTAGCTGAATTTTTCGTGTGCCCGACGATACGAGAAAATGTTGGGAT
TCTTCTATTGACGTTCCATCGTATATGCGCCACACCAAACCACGCTTTGCATGCGTTTGATTTACCATTTGATATGGACGCCGAA
GCGGACTCAACTCAAATCCCTAATATAAGGTCAATCTGCTGCGCCTCGCTTTCAATTTTTCGTTTGTTTTATTTCTATCATGATTG
ATCACCGTTTTGCCATTGATCGGAAAATGAAATTAGGAGGATGATAGAATCAAATTCAAAGTTATTGAGTTTTTAAATTGGTTATT
TCTGCATTTTATTCTCTGCTTCACTTTAGAGGATTCACTTGTGTGAGAGAATATTCTATCTAGTTTTCAATCGGTTTGTGGGAGCT
AATGAGTATCTCTGAAATATATGATTCCCTGAATTTGCTATTTACAGTGACTAATGCGTATCTGCGATGTGTAGTGAATGATGGAA
TGTACTATGGTTCTGAGTAGAATAATATATATTGAATCAGTGCACTCGGTGTTGTTCTTTTTTTATTCCTTTGCGTAGTTCGTTTGA
AAAATAGTTGATTTTTCTTCTTACAGACACAAATGCCCGGCATGCTATAAACAATTCAAGAAGAAAGAGCATCTAACTGAGCACA
TGAAAACCTCAAACCATTCCGTCCATCAGCCTGCATGTGGGGTCTGTCAAAAGCACTGCAAATCTTTTGAGTCTCTGAGGGAAC
ATCTTACTGGTTAGTCATTTCTGTATTCAATCTGTGCTGTCGACATTATTTATTGATTCCATGTTTTATGCTCGTTGTTTATTTTTTC
TTGTTCCTTTTTTAATTATGTTTTAGGTCCTTTGCCAAAAGGAGTTTGTTCAAAGATTTTCTCTCAGCGGGGCTGTCAACTTTGCT
TGGTACTATTTGATAGTCCCGGGTCTCTCGTTTCTCACAGAGAAACATGTCGCTTATCTGCCCCTACTCGTCTAGTAAGTTGATA
ATTGACAACCTTATGAAAAAATAGCTTTCTTATGTTACCGTTCACCTTAAGTAATCAAAGGAACCTGCTTACATTCAGTGTTTCTT
GTATATTCTTTTATTATCTGTTAGGATTAGGAAGTTTATGTTGTTTGTTGAACTGTTGCAGGGAACACGAGAACTGCCCTGTATAG
ATTCCCAATTTGACTGTCTAGATTCTTCTGATGAAAACCATGCTGGCTGGGGCCCCGGAGGAGCAGTTGGAATGGACTGTGAAA
TGGTTGGTGGTGGAAGTGATGGTTCTCTGGAACTTTGTGCAAGAGTATGCTTGGTTGATGAGGATGAGAACTTAATCTTTCATTC
ATATGTACAACCTCAAATACCTGTTACCAATTACAGGTACTTTTGAATTTGTTTCATTGTTTTCTTTTCTTTTACAGATTACTTGTTT
TAGGTTTGACAGGGAGAAGGAAATGAAAAGGAGGTATATAGGATAGAAATATCAATGTTTCACTATTTTTCTGACAGCAGAAATA
GGGACGAGGGAAGTCTTTCCTATGGGATCCTCCTCTTAAATTGGCACGAAATAGAGGGGAGAGATGATGTCTATTTTTCATTGT
CTTTTTAGTTTCTTAAAAAATTAACTAATATTTGTATAACAAAATAATATAAATAATAAATAATTTAATGTTGAAAATAATAGAGAAAA
ATAATCTTTTTTTGGATTAAATTAGTACAAGGATATTTCATACAATTTATTTACTTTTTCATTCTCTCTTTCACTCATCCAAACAAAT
GAGGCAAATTTCTCCACTTTTTCCTTCTTATTTTTATCAATCCAAGACAACTTATTTTTTTAAATACATTTATCCTTTATTTCTATCCT
TCATATTTCTTTACTTTTATTCCCAATAAAGCATTATTCTCATAGAAAAGTGAGTGTTGGGGTTGATTTTGTTTTGATATTTCAGAT
ATGATATAACTGGATTGACAGAAGAACATCTCAGAAATGCCATGCCCCTTTATGAAGTTCGAGAAAAGATTTTGCAAATGCTATA
CAATGGAGAATCCATTGGCAAAGTTAGACTAAATGGTGGAAAGGCCAGGCTTCTTGTGGGGCATGACTTAGCACACGATTTAGA
TTGCTTGAAAATGAATTATCCTGATCATATGCTAAGGTAGATTCTTCTTAATAACTGAAATTTTGTTAAATCCTGCTTGACAGAATT
ATTCTTGACAACACTGTCTTGCACTAATTTTTTTATCACCGCTTTAAGGATTTATCATGATGATGAACTTAGCAGTTGTTAGAAATC
CCCTGAATTTCTTCTGTTTTTCTCCTTTTTATTATCATCATATATACGGTATTATCCTAAACAAGTTTCCAGACTTTAAAGATCTATA
CTATTCTAATTATTATTAGCACTCATCTTTTGCCTATGCTTTATGTTGTGCATTGAAGAGACACTGCAAAGTACCGTCCTTTGATG
AAGACAAACTTCGTCAGCCATTCGCTCAAGTATCTCACCCGAACATATCTTGGGCAAGTTAATTTTTAACTCAATCTTTTTTCCGT
TTAAAATTTCTTCTTCCAATTTAAAGTTTTCCTTTTATTTTAAAAATCAAATTGGCATGATCTAATCGGCCCCATTTGTATGTACAAT
TGTTCAATGACTACCATTTCAATTTTCCCAGGATCCTTATAGATTCTATGAATGATACTTCTCTCTATACTAAAATAAAATAAAATT
GGAGATTAATACTTTCTTATATTCAGTACGAATAAACTAATTTTGAAGGACATGTTCAAGGTGATTGTAAATATAAAATTTTATAAA
CTAAAACAAGTTTTTAGTTATTTTTTGGTTTCAATTTTTTGTGGTTTCGGTACCGAATTTTAAATCCAAACATCCTATGCTAAATGAT
TGACCACTATCTGGGTCTGTTTGCTGGCAAATGAGGTTTGACTGGCAACAGTTGAAAGTGCAGAGGGGTGATAGTGGAGGTGG
TGGCGGAGGAGGTGTGGTGGTTATAAGTAGTGATGGTAACTGGTGATGAAGTCCGTTGTTGTAGTTGCTGTGGTTATAGTAATG
ACGGTGGTAGCAGTGATAATAAAAACATTGATAGCTGACTGGGGAGCAGCAACAATGAGGACCATGGTGGATTGATTAACGTG
AACAACAGTGGTGGTCTGACAGTGATAACGAGTGTAAAATGGTGACCATAGTGGGAAACTGGTGGCAATGAGGGAGGTGGTGG
GTTCTAGTGATGACAGTTTACACGGATGGTTGAGGAGAGATGGGGAAACTAAATTGCTTGTTCTTCCTACCAAAATCCATCATAA
AGCAAAACCTTTTTTTTTTAAATTCAGATAAAAGTATTTTAAAACCAACTAAAAATCAATTCGGCTCCATTCGAAAATCCAAATTTA
AGAACTTACGAGCATTTTTCTTTTGTTTTAAAACAAAATGTATTTGACTAAAATGAAGCTGCGGAATTGGTTTTTGGCTTTTACTTG
GAAGAACAAGTAATCCAGTTTCTCCCATCTTCCCTTACAAGCATCCAAAGTTACTGCAGTGTGTATGCATCCTCAATCAATACTTA
CCTGTTTAATCTTTAAATTACGGTAGTTAACTGCTCTCAATAATTTTTTGTTGTGTTTTTGCTTTACAGTTATGATATCCAATCCGG
CACTCATGATCCGTATGAAGATTGCATTTCTGTCATGAGACTATACAAGAGAATACGAGCTCAAATTCATCCAGAGGAAGCCCAT
GAAACACCGAGTCACAACATTGTTTGCGTGCCTGATAGCTGGAGATCCAGGGAACTTGAGAACCTCACTCCAGATCAGCTCTAT
GCCATGTCAAAATCGGATTACAAGTGTTGGTGCTTGGATTTGAGGCCTAGATTGGCATCCTGAATTGTTTTATCATTGCATTTCT
CCACAGCATCATATCATAATATGCATATTTCTTCAGACACTTTGAAAATGGGGTGGTAAAATGTTTTGCAGTGATATTTTCAGTGC
TTATCGCATAGTCTGGTCCTCGGATCAAGAAAAATATTGAGCAAAGACAGGTGTTTGATTATGATGCTTTTGTAAATATATCTAAC
TGTTTGTTCAAACCAAATAAAGGCTACCCTTTTTAGAATGAAGACTTGCCTACCATAATAAAGGCTACCGACACAAACATAAATG
GATGTAAGGTTTGTTCTAGATCCAATTTCAACGGAGCCACTTAGATCTAAGTTGCTGATTGGAAC
SEQIDNO: 286
MESSIDASWIHCDNLYKLGLFVYKYHLTPTIYLKNKCAACYRQFNKVEHLVEHMKISYHSVHEPTCGICRKHCRSFESLREHLIGPLPK
QECREIFANRGCKFCLKVLDSPNSRRIHQQKCQLSGLNGISGRFSNMGIRDNLTTGGGATTRGPQVVALACKMVGGGSDGSLDLCG
RVCLIDEHENIIFQCYVNPLIPITNYRYETTGMRQEYLRDAMPLKLVQRKIQDFLCNGEPIWTIRSRGGKAKILVGHGLDHDLASLQIEYP
TTKIRDTAKYPPLMKTSKLSNSLKYDIQNGIQDPYDDCVAAMRLYMRMKTQIHKIEDYPLASDPQNRNNFATWRQSELERMSPEQML
EISRSDYYCWCMDSSYSL
SEQIDNO: 287
ATGGAATCTTCCATTGATGCAAGTTGGATCCATTGTGACAATCTCTATAAACTTGGACTCTTTGTCTATAAATACCATCTCACTCC
TACTATTTACCTCAAGAACAAGTGTGCAGCATGCTACAGGCAATTCAACAAAGTGGAGCACCTAGTGGAGCACATGAAGATCTC
TTACCATTCTGTTCATGAACCAACCTGTGGCATTTGCAGGAAACACTGCAGATCCTTTGAGTCTCTAAGGGAACATCTTATAGGT
CCATTGCCAAAACAAGAATGCAGAGAGATCTTTGCCAACAGAGGGTGCAAGTTTTGCTTGAAAGTCCTTGACAGCCCTAATTCT
CGCAGGATCCACCAACAAAAGTGCCAACTCTCTGGATTAAATGGAATAAGTGGTCGTTTTTCAAACATGGGAATTCGTGATAATT
TGACAACTGGTGGTGGAGCAACAACAAGAGGACCACAAGTAGTTGCACTAGCTTGTAAAATGGTGGGAGGTGGAAGTGATGGG
TCACTAGATCTTTGTGGAAGAGTTTGCTTAATCGATGAGCATGAGAACATCATCTTCCAATGTTATGTCAATCCACTAATTCCAAT
CACAAACTACAGGTATGAAACAACAGGTATGAGACAAGAATACTTAAGGGATGCAATGCCATTGAAACTTGTGCAAAGGAAGAT
TCAAGATTTCCTTTGCAATGGTGAACCCATTTGGACAATTCGTTCAAGAGGTGGAAAAGCTAAGATTCTTGTTGGTCATGGTTTA
GATCATGACCTTGCCTCTTTGCAAATTGAGTATCCAACAACAAAAATAAGGGACACTGCAAAATATCCTCCACTCATGAAAACTA
GCAAGCTCAGCAATTCACTCAAGTATGACATTCAAAATGGGATACAAGATCCTTATGATGATTGTGTTGCAGCAATGAGACTCTA
CATGAGAATGAAAACACAAATACACAAAATAGAGGATTACCCTTTGGCTTCTGATCCACAGAACAGGAACAATTTTGCAACATGG
AGGCAAAGTGAGCTTGAAAGAATGAGTCCTGAACAAATGCTTGAGATCTCAAGATCTGACTACTACTGCTGGTGCATGGATTCC
TCATATAGTCTATGA
SEQIDNO: 288
ATGGAATCTTCCATTGATGCAAGTTGGATCCATTGTGACAATCTCTATAAACTTGGACTCTTTGTCTATAAATACCATCTCACTCC
TACTATTTACCTCAAGTTCAGTTCTCTTCTAGTATTTCTTTCATATCTAAGAGAATTATAAAATTCACTTTAAGGAATTATGGATTGC
AGATTTGAGACTGCAGAAACTCGAAGGTTATCTTTCTTTCTTTTAACCATCTTCGTAGTTTTAAATTGTGATCTGCAATTACGGTT
GCAACAGTCATATTTGTCTGCATTTAGCTAGAGCATAATAGTTTGCAGTGTTCCGCAACTACGATCATAATGGCATATATATGCAT
AATTTATTGAGAATTATATTGTTGTGCATGTGCATCTTAACTAGAATAAAATAACTAATTATATATTTAAAATGGATGTATACGTAAT
TAACATAATACAAAATATAGGAACAAGTGTGCAGCATGCTACAGGCAATTCAACAAAGTGGAGCACCTAGTGGAGCACATGAAG
ATCTCTTACCATTCTGTTCATGAACCAACCTGTGGCATTTGCAGGAAACACTGCAGATCCTTTGAGTCTCTAAGGGAACATCTTA
TAGGTAATTAATTAATTAATTAATTATTCATTGTGAATTTGTCACCATTGAAATTTTTTAAAATGATCTATATATATGCTATTGCAGG
TCCATTGCCAAAACAAGAATGCAGAGAGATCTTTGCCAACAGAGGGTGCAAGTTTTGCTTGAAAGTCCTTGACAGCCCTAATTC
TCGCAGGATCCACCAACAAAAGTGCCAACTCTCTGGATTAAATGTATATATCAATAATCTATCAACTTCATTCTCACTGAACTTCA
ATTAGCATATCTAGTTTCTTATTGGAGGATAATATAGTACTTCCTCCTGTCCTTTTTTATAAGAGAAAGTTGGATTAAAATTAAGTC
AACAAAAAATGATATATGTCCTCCACATTATAAATTAGATATAACTACTTTTGTTGACCATATTTTAACCTAATATGTCTCTTATAAA
AAGGATCAAATGGAGTAATATATATATATATATACATATGAATTCAAAGTTCTTAGAAACAATATTTAGTTAAAAATTTTACTTACCT
CTCGATTAAACTGGAAATTTTTAGACTTCTTATCACTGAAAATTGGAAGGATAATACAAAAAAAAAAAAAAAGCACCTTAAAACCA
ACAATTTAATATTCAATATTTCAAATACATGTTTTGAGTTTCAAACAAAAGTGATATATTTGTAGGGCCGGTAATGGGCATGTGCC
AGCAGACCAACTGCAAGTCCAATTTTTTTTTTTTTTGAAGAGTGTTATTGGATTCAAAATATACTACTAAGAGATAAAAAATCACTT
TGTACTATAGGGATAAAAAATTAAATAAAAAATGCCCATAATTCAAAACTAAAAAAGGTCAAGATTTTTTGACAAAAAATTAATAAG
AAAAATAGAATTAGAGTTTCAATGTTATTGATGATGTTTACAAGTTGTTTTTATGTTATTGATGTTATTTATAATATAAATATAGAAC
GATTATTTTTAAATTTTTTATATTTTTTATTAAGAGCCTAATTTTTAAAATTAAAACAGAACCTCTAAAATGTACGATACATTCTTGTA
TATTTAGTTTAATATTTAAAACCATACATCGATTTTATTTGATACACTTTGTCTATATTTAAGGTTTGAGGGAGTAGAGTAGTGATA
TCATATTAATTAATACTATGAGTTGGTTTTGGAGTAATGAAGCTGATTCTCACTCTTATATATAGGGAATAAGTGGTCGTTTTTCAA
ACATGGGAATTCGTGATAATTTGACAACTGGTGGTGGAGCAACAACAAGAGGACCACAAGTAGTTGCACTAGCTTGTAAAATGG
TGGGAGGTGGAAGTGATGGGTCACTAGATCTTTGTGGAAGAGTTTGCTTAATCGATGAGCATGAGAACATCATCTTCCAATGTT
ATGTCAATCCACTAATTCCAATCACAAACTACAGGTATGAAACAACAGGTATGAGACAAGAATACTTAAGGGATGCAATGCCATT
GAAACTTGTGCAAAGGAAGATTCAAGATTTCCTTTGCAATGGTGAACCCATTTGGACAATTCGTTCAAGAGGTGGAAAAGCTAA
GATTCTTGTTGGTCATGGTTTAGATCATGACCTTGCCTCTTTGCAAATTGAGTATCCAACAACAAAAATAAGGTAAATTATATTCA
CTCTAAAATACTTGAGCGTGCACATTCGCTACTGAATTTGGATCATCTAGGACTGTAACATTAGTTAAAAAAAAAAAATATTAAAT
CTAAGTTTAGTAAGAGTTAAAAATTTATACACTTAAATTCAACGACTCTAAAATAATTATATAACTTAGATCTTCAATACACATTGAT
ATGTCTCCATAATAATTACATAAAAGTGGAAGAATATGTAATTCTAAGGATAAAATCTTTTTAAAAAATTGAATAGACCAAAATCAT
ATTTATATTAGAAGTACCAAAAGTGTGATTAACTTATTAATTATTATGTCAACAGGGACACTGCAAAATATCCTCCACTCATGAAA
ACTAGCAAGCTCAGCAATTCACTCAAGTACTTAACACAAGTATATCTTGGGCAAGTATCATTTGAATTTCATTTTATTTTATTGAAA
AAAAATGTTAAATGTCAATTTGTCAAACTTACATACATATAATATCTATTTCAAATAATTAGACATATAATTTGGTGCACATATATTA
TACATACAGGTATGACATTCAAAATGGGATACAAGATCCTTATGATGATTGTGTTGCAGCAATGAGACTCTACATGAGAATGAAA
ACACAAATACACAAAATAGAGGATTACCCTTTGGCTTCTGATCCACAGAACAGGAACAATTTTGCAACATGGAGGCAAAGTGAG
CTTGAAAGAATGAGTCCTGAACAAATGCTTGAGATCTCAAGATCTGACTACTACTGCTGGTGCATGGATTCCTCATATAGTCTAT
GA
SEQIDNO: 289
MESAESLRNKCRACYRQFNKMEHLVEHMRTSYHSGHEPMCGICKKHCRSHESLREHLIGPLPKVECERIFKERGCHICLDIFSSRNA
LKAHLNSCQLSRTNVNGLTYRMANLGIFDDMRNHENGGGRGGRVVALACKMVGGGSDGSLDLCARVCLIDEYENTIFHTYVRPHLP
VTHYRFETTGIRPEMLKDAMGVRQVQKKIQDFLSNGEPLWKIRPKGGKARILVGHGLDHDLKCLEVDFPGMMIRDTAKYPPLMKTSK
LSNSLKYLAKAYLGYDIQTGIQDPYEDCVATMRLYKRMKYQRHKIEDFPQVTDPHRNNFASWRQNELERMSPDDLLALSRSDYYCW
CLDSRDI
SEQIDNO: 290
ATGGAGTCTGCCGAATCTCTAAGGAACAAGTGCCGGGCATGCTATAGACAGTTCAACAAAATGGAGCACCTAGTGGAACACAT
GAGGACCTCATACCATTCAGGCCATGAACCCATGTGTGGCATTTGTAAGAAACATTGCCGTTCACACGAATCTCTCAGGGAACA
CCTAATAGGGCCATTGCCAAAAGTAGAATGTGAAAGGATATTTAAAGAGCGTGGATGTCACATTTGTCTTGACATATTTAGCAGC
CGTAATGCTCTTAAAGCACACCTTAATTCATGTCAGCTCTCACGCACAAATGTCAATGGCTTAACATATCGCATGGCAAACTTAG
GAATTTTTGACGACATGAGAAATCATGAAAATGGAGGTGGAAGAGGAGGAAGAGTGGTTGCACTAGCTTGCAAGATGGTTGGT
GGTGGGAGTGACGGCTCCTTGGATCTTTGTGCAAGGGTTTGTCTTATTGATGAATATGAAAACACTATCTTCCATACCTATGTCA
GGCCTCACCTTCCTGTCACTCACTACAGGTTTGAAACAACGGGGATACGACCAGAGATGTTGAAAGATGCAATGGGAGTGAGG
CAAGTCCAAAAAAAAATTCAAGACTTCCTGAGCAATGGAGAACCATTATGGAAGATCCGTCCCAAGGGTGGAAAAGCGCGAATT
CTTGTTGGTCACGGTTTAGATCATGATCTCAAATGTTTAGAGGTGGATTTTCCAGGAATGATGATTAGAGATACAGCAAAATATC
CTCCATTAATGAAAACCAGCAAGCTCAGCAACTCACTCAAGTACCTAGCAAAAGCATATCTTGGTTACGACATTCAAACAGGTAT
ACAAGACCCTTATGAAGACTGTGTGGCAACAATGAGGCTGTACAAGCGAATGAAGTACCAACGTCACAAAATTGAGGACTTCCC
TCAAGTTACTGACCCTCATCGAAATAATTTTGCTTCATGGAGGCAAAATGAGCTTGAAAGGATGAGTCCAGATGACCTGTTAGCA
CTTTCAAGGTCCGATTACTATTGCTGGTGCTTGGATTCTCGGGATATATGA
SEQIDNO: 291
ATGGAGTCTGCCGAATCTCTAAGGTTCTTATCATTCTCCTCCTCTAATGCTGTATATAATGGTTAAATTACGGCAAAGGTGATCCT
AATTAAGTCATGTGATTTCAGGAACAAGTGCCGGGCATGCTATAGACAGTTCAACAAAATGGAGCACCTAGTGGAACACATGAG
GACCTCATACCATTCAGGCCATGAACCCATGTGTGGCATTTGTAAGAAACATTGCCGTTCACACGAATCTCTCAGGGAACACCT
AATAGGTATCTATGTAAAACACATACAGATATTTATTCTCTTTCATTTTTATCTTGCCTTGTTAAGTTCCTATGCAGTGATACATCTT
TTTAAATTCTTGATTAACCTGTGATCTCAGGGCCATTGCCAAAAGTAGAATGTGAAAGGATATTTAAAGAGCGTGGATGTCACAT
TTGTCTTGACATATTTAGCAGCCGTAATGCTCTTAAAGCACACCTTAATTCATGTCAGCTCTCACGCACAAATGTCAATGTAAGTT
GTATATGCTATGAACTAATCATTCTTGTAGCTTTGCTATGCACAAAAATAGTATCAAATTAACCATATGTAACTAATTTACTTGCTA
AATTCTTTCAGGGCTTAACATATCGCATGGCAAACTTAGGAATTTTTGACGACATGAGAAATCATGAAAATGGAGGTGGAAGAG
GAGGAAGAGTGGTTGCACTAGCTTGCAAGATGGTTGGTGGTGGGAGTGACGGCTCCTTGGATCTTTGTGCAAGGGTTTGTCTT
ATTGATGAATATGAAAACACTATCTTCCATACCTATGTCAGGCCTCACCTTCCTGTCACTCACTACAGGTAATTAAGCATAAATAT
GAAGTTTTTGTGACTATCTGATCAACAAGAAAATAAAAACTATATTCGTACAATTTGTGTGTGTTTCTGTTAATGAAAAATGATGG
GATATTATTAGGTTTGAAACAACGGGGATACGACCAGAGATGTTGAAAGATGCAATGGGAGTGAGGCAAGTCCAAAAAAAAATT
CAAGACTTCCTGAGCAATGGAGAACCATTATGGAAGATCCGTCCCAAGGGTGGAAAAGCGCGAATTCTTGTTGGTCACGGTTTA
GATCATGATCTCAAATGTTTAGAGGTGGATTTTCCAGGAATGATGATTAGGTAAAGTACTCCATATATTTCACAAACACAGAAACA
CAAGTATTGTAACTTTGCACAATTCAATATCTAGACACAAATAAATAACATAAGTTACCTTTGATTTTTGGCGCAGAGATACAGCA
AAATATCCTCCATTAATGAAAACCAGCAAGCTCAGCAACTCACTCAAGTACCTAGCAAAAGCATATCTTGGGTAACTTCCATAAT
TACTCAATCAGTATATGCAACTCTTGTTGTTTCTACAAAAAAAAAACACAAAAGTATAAAGCATAGGCGGTCATTATAGAAATTTT
AACTTGCAAACATTTCCTCAGGTAGTTGATGGTTAATCATCAACCTTTGCTAATTTAAATAGTATTATTTTTCTCTTCAGAAAATGT
TATTTAGATACTGAAGCATCTAGCTCCACCGAAACATCATTCTCATGTTAGGTAGTACTTCAGAATATATGTGCAACTACAAACCA
GGGGATATGATGTTCTTCTTAAGTTTATTATGGAGTACAGTAGAAAATTAAATTTAATTATTTTCTCTTTCTCCTTTTTCAGTTACG
ACATTCAAACAGGTATACAAGACCCTTATGAAGACTGTGTGGCAACAATGAGGCTGTACAAGCGAATGAAGTACCAACGTCACA
AAATTGAGGACTTCCCTCAAGTTACTGACCCTCATCGAAATAATTTTGCTTCATGGAGGCAAAATGAGCTTGAAAGGATGAGTCC
AGATGACCTGTTAGCACTTTCAAGGTCCGATTACTATTGCTGGTGCTTGGATTCTCGGGATATATGA
SEQIDNO: 292
MESAEHLRNKCAACYRQFNRMEHLVEHMRTSYHSDHEPMCGICRKHCRSFESLREHLIGPLPKAECERIFKERGCHICLNILGSRNA
LRSHLNACQLPRTNVNGLAYRMANLGIYDNTRNYENAGGRVVALACKMVGGGSDGSLDLCARVCLIDEYENIIFHTYVKPQLPVTHF
RYETTGIRPEMIMDAPGVRQVQRKIQEFLCNGEAMWKIRPKGGKARILVGHGDTAKYPPLMKTSKLSNSLKYLAKAYLGYEIQTGIQD
PYEDCVATMRLYKKMKYQSHNNKVEDIPLATENRNNFASWRSNELERMSPDELLRISASDYYCWCLDS
SEQIDNO: 293
ATGGAATCTGCAGAGCACCTGAGGAACAAGTGTGCAGCATGCTACAGACAATTCAACAGGATGGAGCACTTGGTGGAACACAT
GAGGACCTCGTACCATTCTGACCATGAACCCATGTGTGGTATCTGCAGGAAACATTGTCGATCATTTGAATCCCTCAGGGAGCA
CCTTATAGGACCATTGCCAAAAGCCGAATGTGAAAGGATATTCAAAGAGCGTGGATGTCACATCTGTCTGAACATTCTTGGCAG
CCGCAATGCTCTCAGGTCTCACCTTAACGCATGCCAGCTCCCACGCACCAACGTAAATGGGTTGGCATATCGCATGGCAAACTT
GGGGATTTACGACAACACAAGAAACTATGAGAATGCAGGTGGGAGAGTGGTGGCACTTGCTTGCAAGATGGTTGGTGGGGGG
AGTGATGGCTCCTTGGATCTCTGTGCTAGGGTTTGTCTTATTGATGAATATGAGAACATTATOTTCCATACCTATGTCAAACCACA
GCTTCCTGTCACTCACTTTAGGTATGAAACAACAGGCATACGACCAGAGATGATTATGGATGCACCAGGAGTGCGGCAAGTTCA
AAGGAAGATTCAAGAATTCCTCTGCAATGGAGAAGCGATGTGGAAGATCCGGCCTAAGGGAGGAAAAGCAAGAATCCTTGTTG
GTCACGGAGATACAGCAAAATATCCTCCACTAATGAAAACCAGCAAGCTCAGCAACTCACTCAAGTACCTAGCAAAAGCATACC
TCGGTTACGAGATTCAAACAGGTATACAAGATCCTTACGAGGATTGTGTGGCAACAATGCGGCTATACAAGAAAATGAAGTACC
AGTCTCATAACAATAAAGTAGAGGACATCCCTCTTGCCACTGAAAACCGCAACAATTTTGCTTCATGGAGGTCGAATGAACTCGA
GAGGATGAGTCCGGATGAACTCCTGCGGATCTCCGCATCTGATTACTACTGCTGGTGCTTGGATTCTTAA
SEQIDNO: 294
ATGGAATCTGCAGAGCACCTGAGGTTCTTAATTCTTCTTTTTGTCCATCGCTTGACTTCTATGCATAACTAATAGACATGATGATC
AGTATCTAGTTACAATTTAATTGCAGGAACAAGTGTGCAGCATGCTACAGACAATTCAACAGGATGGAGCACTTGGTGGAACAC
ATGAGGACCTCGTACCATTCTGACCATGAACCCATGTGTGGTATCTGCAGGAAACATTGTCGATCATTTGAATCCCTCAGGGAG
CACCTTATAGGTATCCATTTTGATCACTCAAAGCATACATGCCTGCTCTATACTCCAATACACTCATAGGTATCCTTTTGTAGTTG
CAGATTTGTTAATTTTTCTTCATTTACTCAATTTCTCATATGCAGGACCATTGCCAAAAGCCGAATGTGAAAGGATATTCAAAGAG
CGTGGATGTCACATCTGTCTGAACATTCTTGGCAGCCGCAATGCTCTCAGGTCTCACCTTAACGCATGCCAGCTCCCACGCACC
AACGTAAATGTAAGCCTGTAAATGAAAATGAAACAATTTGTTTTTCCATCAATTGACTGCTGATCACATGGATTATTTACACTCATT
AACCGCAGGGGTTGGCATATCGCATGGCAAACTTGGGGATTTACGACAACACAAGAAACTATGAGAATGCAGGTGGGAGAGTG
GTGGCACTTGCTTGCAAGATGGTTGGTGGGGGGAGTGATGGCTCCTTGGATCTCTGTGCTAGGGTTTGTCTTATTGATGAATAT
GAGAACATTATCTTCCATACCTATGTCAAACCACAGCTTCCTGTCACTCACTTTAGGTACCTATTTTCAAGCTTCATCTGCTTCTA
TACGACTCCCATCTATCCCAAAAAATGGCTTGGTTTTTCCAATCAAATAACCAGTTTTGTAATGCAAAATCTTCATTTATATGATTT
TTTTTATTAAAAATTATATGGAATAACAATATGGTGTCAATATGTTTACAATTTTATGTGACAGTTAGAAAAAACGAAAATTTTCAG
GTATGAAACAACAGGCATACGACCAGAGATGATTATGGATGCACCAGGAGTGCGGCAAGTTCAAAGGAAGATTCAAGAATTCCT
CTGCAATGGAGAAGCGATGTGGAAGATCCGGCCTAAGGGAGGAAAAGCAAGAATCCTTGTTGGTCACGGGTTGGATCACGATC
TCAGATGCTTAGAGGTGGACTACCCTGGAACAATGATCAGGCAAGTTTTATCTCACATTCACATATATAAACCATCCACAGTACA
TAACTAAACATTAGAACGATTAAAACCTGAACTTGATGAGCACGATTGGATAGCCCAAGTGGTGGGTTTATCCTTTGTTGTCCCC
AAACACTCGGGTTCAACTCTGGCTCATCCTAAGAAGTATTAAAACAGATATTCATTTGCAAGGCATATAAGCCTAAATTGTCAAC
AAAAAAAAACCTGAACTTGATTAACAAGTCATTCTTCTGTTTAATTTGGTTGCAGAGATACAGCAAAATATCCTCCACTAATGAAA
ACCAGCAAGCTCAGCAACTCACTCAAGTACCTAGCAAAAGCATACCTCGGGTAAACTACTTAATAAATTCACACTATATCGTTTC
GCTCTTCTGCCTCTGCATACTGAACACATTTAATCTCGGCCAATCATTCACTTTATTTGTGTTATCAGTTACGAGATTCAAACAGG
TATACAAGATCCTTACGAGGATTGTGTGGCAACAATGCGGCTATACAAGAAAATGAAGTACCAGTCTCATAACAATAAAGTAGAG
GACATCCCTCTTGCCACTGAAAACCGCAACAATTTTGCTTCATGGAGGTCGAATGAACTCGAGAGGATGAGTCCGGATGAACTC
CTGCGGATCTCCGCATCTGATTACTACTGCTGGTGCTTGGATTCTTAA
SEQIDNO: 295
MSRLGLQSSSDFDARAHGARVVALGCKMVGGGSDGTLDLCARVCLIDENENIIFHTYIRPRLPVTNYRYETTGIRPENLRDAIPLKLAQ
RKIQDFLCNGEALWKIRSQGGRARILVGHGVDHDLGCLGIEYPSLLIRDTASYPPLMKTSMLSNSLKYLTHAYLGYEIQNGIQDPYEDC
VAAMRLYVRMRSQAHPRDYSSGSGEAQSRNKFPSWRQRELERMTPEALLEISASDYYCWCLDS
SEQIDNO: 296
ATGTCGAGATTGGGTTTACAAAGCTCATCAGACTTTGATGCCAGAGCTCATGGAGCCAGAGTGGTGGCATTGGGTTGCAAAATG
GTCGGAGGAGGAAGTGATGGAACATTAGATCTCTGTGCTAGGGTTTGCCTCATTGATGAAAATGAAAATATCATCTTCCACACTT
ACATCAGACCTCGGCTACCAGTCACAAACTACAGGTACGAAACAACGGGAATAAGGCCCGAAAACTTGAGGGATGCAATCCCA
TTGAAGCTAGCTCAAAGGAAGATTCAAGATTTCTTATGCAATGGGGAAGCACTATGGAAAATCCGATCACAGGGTGGAAGGGCA
AGGATTCTGGTGGGACATGGAGTAGATCACGATTTAGGATGTCTAGGAATTGAATACCCTTCACTTCTTATCAGGGACACTGCC
AGTTATCCCCCACTGATGAAAACAAGCATGCTTAGCAACTCACTCAAGTATCTCACACACGCCTACCTTGGTTATGAAATTCAAA
ATGGCATACAAGATCCATATGAGGACTGTGTAGCAGCCATGAGGCTATATGTCAGAATGCGCTCACAGGCCCACCCACGTGAC
TATTCCTCAGGATCAGGTGAAGCTCAAAGCCGTAATAAATTTCCATCTTGGAGACAGAGAGAGCTTGAGAGGATGACTCCAGAG
GCCCTGCTGGAGATTTCTGCATCTGACTACTACTGTTGGTGCTTGGACTCTTAA
SEQIDNO: 297
ATGTCGAGATTGGGTTTACAAAGCTCATCAGACTTTGATGCCAGAGCTCATGGAGCCAGAGTGGTGGCATTGGGTTGCAAAATG
GTCGGAGGAGGAAGTGATGGAACATTAGATCTCTGTGCTAGGGTTTGCCTCATTGATGAAAATGAAAATATCATCTTCCACACTT
ACATCAGACCTCGGCTACCAGTCACAAACTACAGGTAACAAAAGAAAATTTCTGAACTGGATAGTACTGGTAATCTTCTTGAAGT
GGTTTGTATTCCTGATACATCTGAATTTTGGACAACTTCATAGGTACGAAACAACGGGAATAAGGCCCGAAAACTTGAGGGATG
CAATCCCATTGAAGCTAGCTCAAAGGAAGATTCAAGATTTCTTATGCAATGGGGAAGCACTATGGAAAATCCGATCACAGGGTG
GAAGGGCAAGGATTCTGGTGGGACATGGAGTAGATCACGATTTAGGATGTCTAGGAATTGAATACCCTTCACTTCTTATCAGGT
AATTGAGGTTCTTATACATCAAATATTCTTGCAAACCTAATGATAGTTTTTTGTTTTGCATTTACATAGTTGCCTTCTCACAGGGAC
ACTGCCAGTTATCCCCCACTGATGAAAACAAGCATGCTTAGCAACTCACTCAAGTATCTCACACACGCCTACCTTGGGTAAGTA
CTAAGTAGTAAGTACATTATGATTTTCTTCATCATTTAAGTTTACACCCTAGAATAACTCAAAACAACTAAATTCAATTACATCTTG
ATTGGTCCACCAACCCTGATGCATATATATAAAATTTGTTTCTTTCCGTTTCAAATGTGTGCACCATGATAAGCAGTGTGGAATAT
ATAAAAATACAACCATTTTTACATCGGTTATCATATCCATATTATACTCGAGCAAATACTCACTTGAATTTACCCCTCCCTTTCGAA
TGACTAGTTATGAAATTCAAAATGGCATACAAGATCCATATGAGGACTGTGTAGCAGCCATGAGGCTATATGTCAGAATGCGCT
CACAGGCCCACCCACGTGACTATTCCTCAGGATCAGGTGAAGCTCAAAGCCGTAATAAATTTCCATCTTGGAGACAGAGAGAG
CTTGAGAGGATGACTCCAGAGGCCCTGCTGGAGATTTCTGCATCTGACTACTACTGTTGGTGCTTGGACTCTTAA
SEQIDNO: 298
MEPQAEIPKSSRHKCSACFKQYKIKDHLVEHMKKSYHSVHQPKCGVCKKHCKTLESVREHLTGPLAKSDCAVVFAALGCKLCLSIFD
NVDARGLHEVSCSFDPPSVPELMSLPIADMCDEVEAAVLNSAVPDDNGTCPKLVALDCEMVGGGDYGSFNLCGRVCLVNEKEEVIF
HAYVKPIIPITDYRYELTGITEDHIVDATPICEVSKRVKEILYNGEESTWRMRTDGGEACLLIGHDLDHDLEVLRMDYPENLTRDTAKYR
PLLKTNLKSHSLKYLTKTYLGYEIQSGTHNPYEDAVSAMRLYKRIRSIVHQTNEISIQDNDDSIYYTNDSKKNSPFDSNKNNKKKSPFDL
YKKCELLAKSPDELLEISKSSYKCWCWDAKRTLNRMIEE
SEQIDNO: 299
ATGGAACCACAGGCAGAAATTCCCAAATCCTCGAGGCACAAATGCTCCGCATGTTTCAAGCAATACAAGATAAAAGATCACCTT
GTCGAACATATGAAGAAATCATATCATTCAGTTCATCAGCCCAAGTGTGGGGTCTGTAAAAAGCATTGCAAGACACTGGAATCA
GTTAGAGAGCATCTTACAGGTCCACTGGCCAAATCTGACTGTGCAGTGGTCTTTGCTGCCTTGGGTTGTAAGCTCTGTCTATCA
ATATTTGATAATGTTGATGCTCGTGGCCTACATGAAGTCTCTTGTAGCTTTGATCCACCTTCTGTCCCTGAGCTAATGTCCTTGC
CTATTGCTGACATGTGCGATGAAGTTGAAGCGGCAGTTTTGAACTCAGCTGTGCCAGATGATAATGGTACTTGCCCCAAATTAG
TCGCTTTGGACTGTGAAATGGTTGGAGGTGGAGATTATGGTTCATTTAACCTTTGTGGTAGAGTTTGCCTTGTTAATGAAAAGGA
GGAGGTGATATTTCATGCATATGTAAAGCCTATAATTCCAATCACTGATTACAGATATGAATTAACTGGCATAACAGAGGATCATA
TCGTAGATGCAACACCAATTTGTGAAGTTTCAAAGAGAGTCAAAGAAATATTGTATAATGGGGAAGAATCGACATGGAGAATGC
GAACTGATGGTGGAGAAGCTTGTCTTCTTATAGGTCATGACTTGGACCATGATCTTGAAGTTTTACGAATGGACTACCCTGAGAA
CTTGACACGGGATACAGCCAAATACCGTCCGCTTCTGAAAACAAATTTGAAAAGCCATTCTCTGAAGTATCTGACCAAGACCTAC
TTGGGGTATGAGATACAGTCTGGTACACATAATCCATATGAGGATGCAGTTTCTGCTATGAGACTTTATAAAAGGATTCGCTCTA
TTGTGCACCAAACCAATGAAATTTCCATTCAAGATAATGATGATAGCATCTATTATACCAACGACAGCAAGAAGAACAGCCCATT
TGATTCCAACAAGAACAATAAGAAGAAAAGCCCATTTGATCTATACAAGAAATGTGAACTCTTGGCTAAATCCCCGGATGAGCTA
CTTGAGATATCCAAGTCCTCCTACAAATGTTGGTGCTGGGATGCAAAAAGAACGCTAAACAGGATGATAGAAGAGTGA
SEQIDNO: 300
ATGGAACCACAGGCAGAAATTCCCAAATCCTCGAGGTGAATATTTCCTTTTATCTTCTAATTCTGTAGCTATCCATTAATTTCTTTT
GTCATTCAATCCTGTATTTGGTAATTAGAGTGAAAATTAAATGACTTCTTGGGTTGCTTACCTACTTACCGCATTTCCTTTTAAGG
TGATGCATGGGTTTGTTGCTTATCGGTTTTTAAATTCAAATTTATGTGGAAAACTCAAATGGGTTTTGATTTTTTCAGTGATCTTAG
GAATCATACTTCGACCTGCTAGTTAAGGGGGGGTTAGTCATCTAGAACTTAAATTTGGAACTGGGATAATCTGTGTGATAAATTT
TTAAGGTGTTAGTCACATAGAACTAAAACTAGAATAAAATTTTACGGTGTTAGTCAAGTAGAACTCTAACAAAACGAGAATTGGG
ATAATGGTACAAAATTATCCCATTTTTTTATTTTTTTATACAAAAATAAGAGTTCTAGTCTCTCAAATTATTCTAAGTTTTAGCTTGG
AACTAGGTGGTAAAAAACTAAAACTCATATTTATTTTGTTTTTTTTTTATTTTTATATTTTTTCCTTTAGGGGGGGTTAGTCATCTAG
AACTTAAATTTGGAACTGGGATAATCTGTGTGATAAATTTTTAAGGTGTTAGTCACATAGAACTAAAACTAGAATAAAATTTTACG
GTGTTAGTCAAGTAGAACTCTAACAAAACGAGAATTGGGATAATGGTACAAAATTATCTCACTTTTTTTATTTTTTTATACAAAAAT
GAGAGTTCTAGTCTCTCAAATTATTCTAAGTTTTAGCTTGGAACTAGGTGGTATAAAACTAAAACTCATATTTATTTTGTTTTTTTTT
ATTTTTATATTTTTTCTTTACTTCTTTCCTATTATGGGTATCACTTAAATGTCCCAATTAACTAACACCCCCTAAGGGAGTIGTTTC
CAATTTAGAGAAAAACCTGGACGCTTTTAGGTATTTCAGTGCATTTATTCTTGTTATAGTTTTAGGGACTTTTTTTAAATTAGTCTT
TGAAGGGCATTGAATATTAGCGATTAACCCATCCTTGTTTAGTTTTAAATTATAAAATTTTAAGAGAAGTAAACAACGCGGTTAAC
CCCCCCCCCCTAAGCTCCGATTCCCGCTACTCCACTCTAGCCACATGGTGCTTACAAGTGCAGACAATTCCTGTACCTTTATTG
TCAGGGGGAACCCCTTTTGATGCCTCAACAGCTCACGTAGGCACCTTAGGCACACCAAAGGCTTGTGGGACATGACATGCAAG
GTGCCCTTACCTCTATTTTGAAATTTTGAGAGTGCGACGGGTGTATAACAAAGTAAACTGATTTTGGAAATAAAATATATATCTTT
TCTTTTCCTTGGCAGATTGTTTGATATTTTTTCTTGTAATGTGCCTAATTACCTATACCTATATTCGAGGACATGACAGTTTGAAAC
TTGAAGTCCAAACTTTATTGCTTTATGACCTATGTAACTAATTAGTAGTTAGTAGAACTATTTAATATTTGTTACTACTCTGTTTAGA
TGGTTCGTGTGTTGTTAAATATCATAGTTTGTGACTTTTTGTGCAATTTTTGAAACTTTTTGGATTTTTTAATAATACTTCATGAATT
ATAATATGTTAGCTATGTATGATTTCTTAATCTTATTTTTTTAAATTGTTGAGTTGTAGGTAGTTCACGCAGGATTAATATAGGATA
TAATTAGTATTAGGATAGTGTAAGATTTAAATGAAATATTCAAAATAATGTTTCATGTATTTTATTAATCTTTTTTTATAAATTGTTGA
GCTATAAGTAGTTCACATTGGATTAGTATCAGATATAATTAGGATTAGGATAAATTAAGATTTATATAAAATATTTAAAATAATGAA
GAGTAATATTGACCATGGAAAGCAACATCATGACCTCATCTCCTTAAACTTGCGTTTCGCTTTTAAAACACTGCTTATACTTTAGT
GAAAAAGAAGTCACAATCTTCTTGGTCTGCGCCTAAATAGTTATCTCATTTCCAATTCTCAAAGTCCTATCAACGATAGTATCACA
AACTTATTCTGCAACAAGTATCTCTTGTTCTTCAGCTTTACATAAGTAATTCGAGTGTTCTGAAGATTATAGATATATTTGGCCCCA
TACATGGAGAGGTACAAAGGTAGGTCTCATAACAGACTGCCTCAGACACTAGAGTAGACACTAGGGTCTCTTGACAATAGAGCC
TCACACATGGAGACATAAAGTAGAAGTTCATATAAGGAGACCGATAGTAACGACTCGGACATTGATACAAACAATAGGGTCTTG
GATTTGGCTTTTTTGTTTTGAATCTTTACGGTCGTTGTCAGAGAGTGTTATATGAGGAGAAGATGAAGCTACCAGGGGGAAGCTT
AGAGATGGTACTTGAGCCGACAACCCTTGTGGCTGCTTTGAGTTTTAGGCATTATAAAAGAGGTATTATCATGGTTTTGAATATC
CCTAATATATCATTTTATAAGGCTTGCTGCTAAATGATATGATCTCAATTCATTTTCGGTTTTGTCAATTTTTAGGCGATATTATAT
CATGATTTTCCAATATATCAAGTTACATTTCAGCCTCAAAAATCACCAGAAATGTTGCAGTATCAATTTGGATTTTTATTTGTTATA
AAAGATTGGTCTGGATTTATGGTTCAATTGAGGCCTAAACCCGAACAAATATCTGTTAAATAACCAGAAACAAGTGGAGCTCGAT
TGAGACCGAATTCTCTTGCAACATGTTCCCAATATCTGATAGTTAGAACATTGGGTATTATAGAATTATCATTTTAGCTTCGGTAC
ATTGTTATGTTGCAGAAAGTAATTTCACCATAGTGAGGGTCTGAGGGATATTCAGAGTTTATTTATTGTAAATCAAAAACAACACA
CAAGTACATTTTTTCAATGAGAAACAACCGAAGTTCTGGAACTTTCCTAAATATATAACTGCTCTAATAATGGGTATTTGTTAAAG
TTGAGAAACGGTGAGAGGATGAGATGGAGACAGGAGCTATGCTGGATGAAACTGCTAGAAGCCTAGAACAAACTAGGTCTGAA
GCTATAATGGAGTAGAATGTGAATGGAGCCACATACAAATACAATAAAAAATATGGACTTAATAGGCAATAGAGAAAGCTTTCCA
TTTAGTAGATTCTAATCATGCAGGGTAAAGGCTTTGTTGTTTCAATTTCTGGTTTGTTGTTTTCTTGTTTCCCTCTTGGTGTCTGTG
TAGTTATAATGGAAATTCTGATAACAAAAACACCATTTCGTTTGAAAATGGATGTCAAAATCCCAAGAGCGGAAAAATTATTAGTC
CTAAAGCTATTAGCCTTCATAACAAGTAATGGAGGCTAAGCATGCATGCATGCCACCTTGTATAAATCATGTGAATATGCTTAATT
CCGTGTTCTAGAGGATTGCTTCTGCTGTTTTTTATATATGACAATTTGTTGTTTGCTATTCAAGGCATTTTCATTAGTTAGCAATTG
GGCATCAGAGTGGACATTCATATGCTTCATGCATCTTAATCTAACCTTTTTACAGGCACAAATGCTCCGCATGTTTCAAGCAATA
CAAGATAAAAGATCACCTTGTCGAACATATGAAGAAATCATATCATTCAGTTCATCAGCCCAAGTGTGGGGTCTGTAAAAAGCAT
TGCAAGACACTGGAATCAGTTAGAGAGCATCTTACAGGTAGCTACTTAAGCTAAACTTTAAGCATATGCAGTTATGTTTCAAATG
TTAGTTTTAATCTCTTACTATTTCTTATTTTTCACTCTATTAAATTTCAATTGCATGAAGGTCCACTGGCCAAATCTGACTGTGCAG
TGGTCTTTGCTGCCTTGGGTTGTAAGCTCTGTCTATCAATATTTGATAATGTTGATGCTCGTGGCCTACATGAAGTCTCTTGTAG
CTTTGATCCACCTTCTGTCCCTGTAAGTTATGCAACAAAAGCTTGATACTCATATATTCTTCTACTTAGTCTCTCCCATCTAAAGTT
GAATGGGTATTTTTATAGGAGCTAATGTCCTTGCCTATTGCTGACATGTGCGATGAAGTTGAAGCGGCAGTTTTGAACTCAGCTG
TGCCAGATGATAATGGTACTTGCCCCAAATTAGTCGCTTTGGACTGTGAAATGGTTGGAGGTGGAGATTATGGTTCATTTAACCT
TTGTGGTAGAGTTTGCCTTGTTAATGAAAAGGAGGAGGTGATATTTCATGCATATGTAAAGCCTATAATTCCAATCACTGATTACA
GGTTCTCTCTTTCAGTTCATTCCTGATGATTGTTATAGGAATGGGTTATTTAGATATTAGTCCATAAAGTCATCAAGAATTCCATAT
TAGCCTTCAAATATGTGAAATTGCTCGTGAGTGGGTCTTGCACTTGGTCGCTCAATGACCAAACTACCCTCCAGTCTATGTTCCC
TCTAAAAACCCTTCTCGTCCAGAAAAACATTGGCTAACGGGTATTTTGGTCATTGAGTGACCAAATTGCAAGACATCTTAGGATT
TGAGAGACATGCATAATTTCAAATATGTGAAGGATTAATATAGAACTATTGAAGATTTGAGAGACTGTATATAATAACCCTTTAGG
AATTTCTTGTGTTTGTGTATTCAGATTAACCTTAATTTGCAACTGGCTCCAGATATGAATTAACTGGCATAACAGAGGATCATATC
GTAGATGCAACACCAATTTGTGAAGTTTCAAAGAGAGTCAAAGAAATATTGTATAATGGGGAAGAATCGACATGGAGAATGCGA
ACTGATGGTGGAGAAGCTTGTCTTCTTATAGGTCATGACTTGGACCATGATCTTGAAGTTTTACGAATGGACTACCCTGAGAACT
TGACACGGTGAGCTCTTGATGATCCTCTTGTCCTCTTCTTAGTTGAATGCAAAATTAAATTGCATTTACAACCTTATGAAAAATTA
AAGTTTTTTTTTCTTTTTCTTTTGGGCTAACTCACTGAATTGTTCCTTTGATCTTTATACAGGGATACAGCCAAATACCGTCCGCTT
CTGAAAACAAATTTGAAAAGCCATTCTCTGAAGTATCTGACCAAGACCTACTTGGGGTGTGTAACTCGTTCGTATGTTACACTCC
CTATCAACACTGTAATATTTATAGTAAAATACAACTTCGTGTTCTTTTAGGATGTTTTATTGCTAAATTTAGTGGTTTAGTATCAAG
TTTCCTGATATAATTGTAAAGTTCATATTTGTTTAAGTGACATTGATTAAAGAATAATTCAACCATGTACTCAAACACTAAGTGTCA
AAGCGCATGACTTATACTCTTTAAGCTTGTAGAATTATAACATACGGACAAGTAGAAATTTTTTTTATCTGGAAATATGAAGTATCT
CGACTCTAATATCATCCTCTGTGGTTGATAATATGATATCTCTTGTTTACCCCGTATTACTAGGAAATAGTAAACAATTGAATTGAT
TGAGAATGTAACCACTGTTTTTGAATCCTAATGCATGCATTCATGTCGATACACTTCTTCTGTTAACAACTAGATAATCCTGTTTG
AAAATCCCAAAATGAATTTATTAACCAAGTTTTGGCTTTATAGGTATGAGATACAGTCTGGTACACATAATCCATATGAGGATGCA
GTTTCTGCTATGAGACTTTATAAAAGGATTCGCTCTATTGTGCACCAAACCAATGAAATTTCCATTCAAGATAATGATGATAGCAT
CTATTATACCAACGACAGCAAGAAGAACAGCCCATTTGATTCCAACAAGAACAATAAGAAGAAAAGCCCATTTGATCTATACAAG
AAATGTGAACTCTTGGCTAAATCCCCGGATGAGCTACTTGAGATATCCAAGTCCTCCTACAAATGTTGGTGCTGGGATGCAAAA
AGAACGCTAAACAGGATGATAGAAGAGTGA
SEQIDNO: 301
MGFLGPLPKAECEKIFKERGCDICLTFLASRNALRAHKESCQFSRSNNGLLYRMTRLGLGFQDDLKIGNSQGRVVALSCKMVGGGTD
GSLDLCARVCLIDEHERILFESYVAPNIPITNYRYEISGIRPEYMRNAMPLKQVSRKIQDYLCNGEPIWQIRTRSGRARILVGHNLDHDL
KCLEIEYPTIMIRDTAKYPPLMKTSKLSNSLKYLSKAYLGYEIQIGVQDPYDDCVATMRLYMRMKSQVHKRENYPLATDPQNRNNFAS
WRENELEKMMPPQLLEISRSDYYCWCLDS
SEQIDNO: 302
ATGGGATTTTTAGGACCATTGCCAAAGGCTGAGTGTGAGAAGATTTTCAAGGAACGAGGATGTGATATTTGTTTGACATTCCTTG
CTAGCCGGAATGCACTAAGGGCTCACAAGGAATCATGTCAATTCTCACGCTCAAATAATGGTTTGCTCTATCGCATGACTAGGT
TGGGATTAGGATTTCAAGATGACCTAAAAATTGGCAATAGTCAAGGAAGAGTTGTTGCTCTTTCCTGCAAAATGGTGGGAGGTG
GCACCGATGGCTCTCTTGATCTTTGTGCAAGAGTTTGCCTCATTGATGAACATGAAAGAATCCTCTTTGAATCCTATGTTGCACC
AAATATTCCCATCACTAACTATAGGTATGAAATATCGGGGATAAGGCCAGAATACATGAGAAATGCAATGCCACTAAAGCAAGTA
TCAAGAAAAATTCAAGATTATCTTTGTAACGGGGAACCTATTTGGCAAATTCGTACTAGAAGTGGAAGGGCAAGGATCCTTGTTG
GTCACAATTTGGATCATGATTTAAAATGCTTAGAAATTGAGTACCCAACAATAATGATAAGGGATACGGCAAAATACCCTCCACT
AATGAAAACAAGCAAGCTGAGCAACTCACTCAAGTACTTGAGCAAAGCTTATCTTGGATATGAAATTCAGATAGGAGTGCAAGAT
CCATATGATGATTGTGTTGCAACAATGAGGTTGTACATGAGAATGAAATCACAAGTTCATAAAAGGGAGAATTATCCACTTGCAA
CTGACCCACAAAATCGTAATAATTTTGCATCATGGAGGGAAAATGAGCTTGAGAAGATGATGCCTCCACAATTACTAGAAATCTC
ACGATCTGATTATTATTGTTGGTGTTTGGATTCCTAG
SEQIDNO: 303
ATGGGATTTTTAGGACCATTGCCAAAGGCTGAGTGTGAGAAGATTTTCAAGGAACGAGGATGTGATATTTGTTTGACATTCCTTG
CTAGCCGGAATGCACTAAGGGCTCACAAGGAATCATGTCAATTCTCACGCTCAAATAATGTATGCTTATTCCAACAACACAACTA
TGGTTAAACGTAACTCAACTGACACCTTATTTTTTCTCATAGTTTTAAATATATTTGTTAATTTTCAGGGTTTGCTCTATCGCATGA
CTAGGTTGGGATTAGGATTTCAAGATGACCTAAAAATTGGCAATAGTCAAGGAAGAGTTGTTGCTCTTTCCTGCAAAATGGTGG
GAGGTGGCACCGATGGCTCTCTTGATCTTTGTGCAAGAGTTTGCCTCATTGATGAACATGAAAGAATCCTCTTTGAATCCTATGT
TGCACCAAATATTCCCATCACTAACTATAGGTAATTAATTAATTAATTATCGTACTAAAGTTTAATTAATTAACATAATATAGACGAT
TTGATCAATAATATTGTTAATGTTTAGGTATGAAATATCGGGGATAAGGCCAGAATACATGAGAAATGCAATGCCACTAAAGCAA
GTATCAAGAAAAATTCAAGATTATCTTTGTAACGGGGAACCTATTTGGCAAATTCGTACTAGAAGTGGAAGGGCAAGGATCCTTG
TTGGTCACAATTTGGATCATGATTTAAAATGCTTAGAAATTGAGTACCCAACAATAATGATAAGGTAAACACAACATGCATGTACA
ATTAGTAATATGATAAGAGAATAAAATTTACTAAATTACATTAATTACTCCTATTAATTACAATCAAAGTAAAAATTATATGTAAATT
TCTCCTATTGTTTAATGTTTTTTGTTTTTAATATTTTTAATTTGTATGTAGGGATACGGCAAAATACCCTCCACTAATGAAAACAAG
CAAGCTGAGCAACTCACTCAAGTACTTGAGCAAAGCTTATCTTGGGTACGTAAATACTTTAAATTGTTAATTATTGTGACTTTTTA
TGTTCAAATTCACACATCGTCCTAATCAGAATCAATCTTAATTGTCTTGTAATCGAATAGATATGAAATTCAGATAGGAGTGCAAG
ATCCATATGATGATTGTGTTGCAACAATGAGGTTGTACATGAGAATGAAATCACAAGTTCATAAAAGGGAGAATTATCCACTTGC
AACTGACCCACAAAATCGTAATAATTTTGCATCATGGAGGGAAAATGAGCTTGAGAAGATGATGCCTCCACAATTACTAGAAATC
TCACGATCTGATTATTATTGTTGGTGTTTGGATTCCTAG
SEQIDNO: 304
MANLGIQDELRIDNNRGRVVALACKMVGGGSDGSLDLCARVCLIDEHERILFHSYIKPNIPVTNYRYEMTGIRPEYLRDAMPLRNVSR
KIQEFLCNGEPIWQIRSKGGRSRILVGHGLDHDLKCLEMDYPAIKMRDTAKYPPLMKTSKLSNSLKYLTKAYLGYDIQIGVQDPYEDCV
ATMKLYMRMKLSQFHKKENYPLATDPQNKNNFASWRQNELERMTPDQLLDFSRSDYYCWCLDSQDY
SEQIDNO: 305
ATGGCTAATTTGGGGATTCAAGATGAACTAAGAATTGATAACAACAGAGGAAGAGTGGTTGCCCTTGCTTGTAAAATGGTTGGT
GGTGGAAGTGATGGATCTTTAGATCTTTGTGCAAGGGTTTGTCTCATTGATGAACATGAAAGGATCCTCTTTCATTCATATATCAA
ACCAAATATTCCTGTCACTAACTACAGGTATGAAATGACGGGTATAAGACCAGAATATTTGAGGGATGCGATGCCTTTAAGGAAT
GTGTCAAGAAAAATTCAAGAATTTCTTTGCAATGGGGAACCTATTTGGCAAATCCGTTCTAAAGGTGGAAGGTCTAGGATTCTTG
TTGGCCATGGTTTGGATCATGATCTTAAATGTTTGGAGATGGATTACCCAGCAATAAAGATGAGGGATACTGCAAAATACCCACC
ACTTATGAAAACAAGCAAGCTCAGCAACTCCCTCAAGTACTTGACCAAAGCTTACCTCGGGTATGATATTCAAATTGGAGTACAA
GATCCCTATGAAGACTGTGTGGCCACAATGAAACTCTACATGAGAATGAAATTATCACAATTTCACAAAAAAGAGAATTATCCTC
TTGCTACTGATCCACAAAATAAAAATAACTTTGCATCTTGGAGGCAAAATGAGCTTGAGAGGATGACTCCTGACCAACTGTTGGA
TTTTTCAAGGTCTGATTATTATTGTTGGTGTCTGGACTCACAAGATTATTAA
SEQIDNO: 306
ATGGCTAATTTGGGGATTCAAGATGAACTAAGAATTGATAACAACAGAGGAAGAGTGGTTGCCCTTGCTTGTAAAATGGTTGGT
GGTGGAAGTGATGGATCTTTAGATCTTTGTGCAAGGGTTTGTCTCATTGATGAACATGAAAGGATCCTCTTTCATTCATATATCAA
ACCAAATATTCCTGTCACTAACTACAGGTGATCAATTTAAATTAATAACGTAAAAAAATCTTAACACAATAAATAAATTTCCATCTT
TATTATAACATTTTATTTAGTTACTATGCTATCGAACGGAGTAATAATACTTAGCTTGTTGTGTAAATATTTTCACATTCCTAGTACA
TAAAATTTAAACTCAAATATTAAAGCATGTTCACTTGTTTTTGGTCTTTTTGGGGCCCATTGTAAATTCCTACGACACCATGACAA
GAAGGTATAAGAATTTTCTTATATTGACTATGTATATTAACTTAAACTCTGACGAGAATTATATATGTTTATAGGTATGAAATGACG
GGTATAAGACCAGAATATTTGAGGGATGCGATGCCTTTAAGGAATGTGTCAAGAAAAATTCAAGAATTTCTTTGCAATGGGGAAC
CTATTTGGCAAATCCGTTCTAAAGGTGGAAGGTCTAGGATTCTTGTTGGCCATGGTTTGGATCATGATCTTAAATGTTTGGAGAT
GGATTACCCAGCAATAAAGATGAGGTAAATTAATTATTTGATCATTTATATAATCTAAAAATAATTTCATAACTTTATTGCTATAAAA
AACATGAAATTGACTCGTACTCATAGTTGTTGTTATTATATAGTAGTATATATTACTCCGATCCCTATAGATGAACGTTCTAACAAA
GACAAACAACACGGGAAAATTACAGTCAAATGTCTTTAGGTCATCTAGTTTACAAAGTATATACACAGTAGTAGTGTATATTTTAT
ACTAAATATATATACATATATTTATTCATTTGATATACCTACCTTATACATATAAGCAATATATATAGCTTGAAGTATATAAATAGTG
TATATTTCGACCATATTTACGTGACTTCCCTTCTAACATTTGTTTAATTTTTTCTTTTTTCTGAAGGGATACTGCAAAATACCCACC
ACTTATGAAAACAAGCAAGCTCAGCAACTCCCTCAAGTACTTGACCAAAGCTTACCTCGGGTAATATATATTAATAGTGCATCAA
ACTTTATCCTAATAAATTTTCTTGAGTACCACAACTATATATTATTAATTTAACTTGTTGCAAGTTACGTTTTATAAAAAATCTAAAA
ATTGATGGACAATAATATAATGAAAAATGTGTAGGTATGATATTCAAATTGGAGTACAAGATCCCTATGAAGACTGTGTGGCCAC
AATGAAACTCTACATGAGAATGAAATTATCACAATTTCACAAAAAAGAGAATTATCCTCTTGCTACTGATCCACAAAATAAAAATA
ACTTTGCATCTTGGAGGCAAAATGAGCTTGAGAGGATGACTCCTGACCAACTGTTGGATTTTTCAAGGTCTGATTATTATTGTTG
GTGTCTGGACTCACAAGATTATTAA
SEQIDNO: 307
MDYQASETLRNKCAACFRQFNKMEHLVEHMRISYHSVHEPMCGICKKHCRSFESLREHLIGPLPKQECKNIFSVRGCKICLAIFDTPN
ARWVHQERCQLSNANTGLVGRFANLGLRDNLTIDCASRGPQVVALACKMVGGGSDGSLDLCARVCITDEYNNIIFHSYVKPPIPVTN
YRYEITGIRAEYLRDAMSLRQVKKKIQDFLCNGEPMWKIRPKAGRARILVGHGLDHDLDRLQIEYPSLMIRDTAKYPPLMKTSKLSNSL
KYLTQAYLGYEIQNGIQEPYEECVATMRLYMRMRNQSHKKEDYPLASDPQNRNNFASWRQNELERMIPEEMLAISRSDYYCWCLD
SEQIDNO: 308
ATGGATTACCAGGCCTCTGAAACCCTAAGGAACAAATGTGCAGCCTGTTTCAGGCAATTCAACAAGATGGAGCACCTGGTGGA
GCACATGAGGATTTCTTATCACTCGGTGCATGAGCCCATGTGTGGGATCTGTAAGAAACATTGCAGATCTTTTGAGTCTCTAAG
GGAACATCTTATAGGGCCCTTGCCTAAGCAAGAATGCAAGAACATATTCAGCGTCCGAGGATGCAAAATCTGTTTAGCGATCTT
TGACACTCCTAATGCTCGTTGGGTTCATCAAGAAAGATGCCAGCTTTCTAATGCAAACACTGGGTTAGTGGGTCGATTTGCAAA
CTTAGGGCTGCGTGACAACTTGACTATTGATTGTGCGAGCCGAGGTCCTCAAGTAGTTGCATTGGCTTGCAAGATGGTTGGGG
GAGGGAGTGATGGGTCCCTAGACCTCTGTGCCAGGGTCTGCATCACCGACGAATATAATAATATCATCTTTCATTCTTATGTCAA
GCCACCGATTCCAGTCACAAATTACAGGTATGAGATAACGGGAATTCGAGCTGAATACCTGAGAGATGCAATGTCACTAAGGCA
AGTGAAGAAGAAGATTCAAGATTTTCTGTGCAACGGAGAGCCAATGTGGAAAATTAGACCCAAAGCAGGAAGAGCAAGGATTTT
AGTGGGTCATGGTTTGGATCATGATCTTGATCGTCTACAAATTGAGTATCCTTCTCTCATGATCAGGGATACTGCAAAATACCCG
CCATTGATGAAGACAAGCAAGCTCAGCAACTCACTCAAGTACTTAACTCAAGCATACCTGGGGTATGAGATACAAAATGGGATA
CAAGAGCCATATGAAGAATGTGTTGCAACAATGAGGCTTTATATGAGAATGAGAAATCAATCTCACAAGAAAGAAGATTACCCTC
TTGCTTCTGATCCTCAAAACCGCAATAACTTTGCTTCGTGGAGGCAGAATGAGTTGGAGAGGATGATACCAGAAGAGATGCTGG
CTATTTCAAGGTCCGATTACTACTGTTGGTGCCTCGATTGA
SEQIDNO: 309
ATGGATTACCAGGCCTCTGAAACCCTAAGGTATATACGTATATGCATACACGTACTACTCTTACTAGCTAATTTATACACCACATC
TGGAAGTAATCCTTTATTAACTAACTAATATATATATATATATGTATATGTATATGCATCATGTAGGAACAAATGTGCAGCCTGTTT
CAGGCAATTCAACAAGATGGAGCACCTGGTGGAGCACATGAGGATTTCTTATCACTCGGTGCATGAGCCCATGTGTGGGATCT
GTAAGAAACATTGCAGATCTTTTGAGTCTCTAAGGGAACATCTTATAGGTATGTAAAGCATTTATATCTATATATATCTGTATACA
CATTTTCTAAAATTCATGGTGATATGATATAATTTGTTTTCATTTAAATGTATATATATATTAGGGCCCTTGCCTAAGCAAGAATGC
AAGAACATATTCAGCGTCCGAGGATGCAAAATCTGTTTAGCGATCTTTGACACTCCTAATGCTCGTTGGGTTCATCAAGAAAGAT
GCCAGCTTTCTAATGCAAACACTGTAATTATTATATTTATATATACATATTAATATTCATATATATTCTGCATATTTTGTTGTAATATT
TTTTATTGAATTTCTACTTTGAACATACATATATATATATATATAGGGGTTAGTGGGTCGATTTGCAAACTTAGGGCTGCGTGACA
ACTTGACTATTGATTGTGCGAGCCGAGGTCCTCAAGTAGTTGCATTGGCTTGCAAGATGGTTGGGGGAGGGAGTGATGGGTCC
CTAGACCTCTGTGCCAGGGTCTGCATCACCGACGAATATAATAATATCATCTTTCATTCTTATGTCAAGCCACCGATTCCAGTCA
CAAATTACAGGTATACACACACGTACACACACACACACTATATATCATAATGTATTTGGAGACATCCCTTAATATCATCTTTGTGA
TGCTACCAAGTGAAATTAATTAATCGGAAGAGTTATCCAACATATATAAATAGTGTAAATTTTTATATTTAATTAGCATGAAATTGT
ATATTTATGCATTTTTATATTAATCTTATGGTAATGACACCTAATGATATAATAATTATTAATTAAATTTTAATTATATATGATTAAAT
TTAAGGTATGAGATAACGGGAATTCGAGCTGAATACCTGAGAGATGCAATGTCACTAAGGCAAGTGAAGAAGAAGATTCAAGAT
TTTCTGTGCAACGGAGAGCCAATGTGGAAAATTAGACCCAAAGCAGGAAGAGCAAGGATTTTAGTGGGTCATGGTTTGGATCAT
GATCTTGATCGTCTACAAATTGAGTATCCTTCTCTCATGATCAGGTATATGTATATATATGTTTACACACACAGAAAAGAGAATTA
ATTATATTATATTTTCTCTATTTGTCTCGACAAAGTCTTTGAGATCTATTAAGCAACACTTTATGTATATACATATAAATATGGATGG
AAATTTATTTGTGAATTAATATAGGGATACTGCAAAATACCCGCCATTGATGAAGACAAGCAAGCTCAGCAACTCACTCAAGTAC
TTAACTCAAGCATACCTGGGGTGAGAATTTATAAGATGTTTAATTAATTAAATTAATATTTATTTATTTATTCATGAAGTAAAGAATC
TGTAATATATGTACGTGTGTATATATATAGGTATGAGATACAAAATGGGATACAAGAGCCATATGAAGAATGTGTTGCAACAATG
AGGCTTTATATGAGAATGAGAAATCAATCTCACAAGAAAGAAGATTACCCTCTTGCTTCTGATCCTCAAAACCGCAATAACTTTG
CTTCGTGGAGGCAGAATGAGTTGGAGAGGATGATACCAGAAGAGATGCTGGCTATTTCAAGGTCCGATTACTACTGTTGGTGC
CTCGATTGA
SEQIDNO: 310
MTHARVNHHNPGHNHRVNHHHLHQTATTTVKVDEKWKVIEVARRKMNRERHRRLFSKNKCAACYRQFNRKEHLVDHMRTSFHSV
HEPMCGVCKKRCRSFESLREHLIGPLPKVECAKIFSSRGCNICLTILDSPYTLRMHRGACQLSRPNALISSMANLKMCDNMKIDYGRE
RSPNVVALACKMVGGGNDGTLDICARVCLTDEYDNILFQTYVKPHIPVTNYRFETTGIRPDYLRDAMPLKQVQRKIQDFLCNGEPVWK
IRSRGGKARVLVGHGLDHDLECLGMEYPALMLSYEIQIGVQDPYEDCVATMKLYMRMRSQNHKAEYYPLASDPQNRNNFAQWREA
ELEKMTPDELLAISRSDYYCWCLDLKGYM
SEQIDNO: 311
ATGACCCATGCCCGCGTCAACCACCACAACCCAGGCCACAACCATCGTGTAAACCACCACCATCTACACCAGACTGCCACCAC
TACCGTGAAAGTCGACGAGAAATGGAAGGTGATCGAGGTGGCTCGTCGAAAAATGAACCGGGAACGCCACCGTCGGCTTTTCA
GCAAAAACAAATGTGCTGCATGCTATAGACAATTTAACAGAAAGGAACATTTGGTGGATCACATGAGAACCTCCTTTCACTCTGT
TCATGAACCTATGTGTGGTGTTTGTAAAAAGCGTTGCCGATCCTTCGAATCATTAAGAGAACATCTTATTGGACCATTACCAAAG
GTGGAATGCGCAAAGATATTTAGTAGTCGAGGATGCAACATATGCTTGACCATTTTAGATAGCCCTTACACCCTCAGAATGCATC
GAGGAGCATGTCAACTCTCTCGACCAAATGCACTAATTTCTAGCATGGCAAACTTGAAAATGTGTGACAATATGAAGATCGATTA
TGGTCGAGAAAGAAGTCCTAACGTAGTTGCGCTTGCATGCAAAATGGTAGGAGGTGGTAATGACGGAACACTTGATATTTGTGC
AAGGGTTTGCCTAACTGATGAATATGATAACATTTTGTTTCAAACATATGTCAAGCCTCATATTCCAGTGACTAACTATAGATTTG
AAACCACGGGTATCAGACCGGATTACTTGAGGGATGCAATGCCATTGAAGCAGGTTCAAAGAAAAATTCAAGATTTCTTATGCA
ATGGAGAGCCGGTGTGGAAAATTCGATCAAGAGGAGGAAAGGCTAGGGTTCTTGTTGGCCATGGACTAGATCATGACCTTGAG
TGCCTAGGAATGGAATATCCCGCATTGATGCTTAGTTACGAAATCCAGATTGGTGTCCAAGATCCTTATGAAGATTGTGTTGCTA
CAATGAAACTCTACATGAGAATGAGGTCTCAAAATCATAAGGCAGAATATTATCCATTAGCCAGTGACCCACAAAATCGCAACAA
CTTTGCTCAATGGAGGGAAGCTGAACTTGAGAAAATGACTCCAGATGAACTATTAGCAATATCAAGGTCCGATTACTATTGCTGG
TGCTTAGACTTGAAGGGATATATGTGA
SEQIDNO: 312
ATGACCCATGCCCGCGTCAACCACCACAACCCAGGCCACAACCATCGTGTAAACCACCACCATCTACACCAGACTGCCACCAC
TACCGTGAAAGTCGACGAGAAATGGAAGGTGATCGAGGTGGCTCGTCGAAAAATGAACCGGGAACGCCACCGTCGGCTTTTCA
GCAAGTATGACTTTTTTTTGGGGGGTTTAAAGTGGTTAGATTAGCCGGAGAAACTGCCGTTTGACGACAGTAAACCACAGCCAC
AAACTGGTTAACCGTCACGGTAACCGGATTTGGGCTTTGATTACCGTGGTCAACCTGAGCTGAAAATCGGTCACCGTCCACGAT
AACTGGTTTAGGGCTCCGGTTACCGTGGTCAACCGGAGCTAAAAAATCGTCACGGTAACCGGTTTTGACTTACGGTATTAGCCA
TCGATTTTATTAAAAAAAACGAAAAACAGAAGAAAAAAAAATCCACGAGAATACTTACCTCCTTTTGAAATTTACATGGTACAGCA
GGGTGTACCATGCTCATGGTACACTTGGAAGAAAATTGTCATTAAAAAAAAAAAGTTAGCTTCCTAAATTTATGCTCCTTAATTGA
AGGATTTTTGTTATTACCTTTCCATAATTTTAGCTTTTCATATCCATAATTGTTCATTCAGTTTTTGAAAAAATAGTAAATTTTAGAG
TAGAAATAAAATTCCAAGAGAAAAAAATAAATTTTTTAGAGAGAAAATGATGGCTCATGATGAATTTTCACGATATATGATTGTTG
ATTTGCACTTGATGATCACCAAGTTGATGTTTTTAACAAATGATATTTAATTTTAAATTTTGTCACCAAATGAGAAGGTACTTTTTA
ATTAATTTATTTTTTATTTATATTTCATAATTTTGTTGTTGATGATGATGTTTTTAGATTATTATATTTGTTCATGGATCATTGTTAAC
GAATTCATCACGGCAAGAAAATGTAATTTTTTTTTTTTTTGGTTATTTAGTTTTTTTTTTTTTAATTTGTGTTATTTTCGAATGTTGAA
AATGAAGTTCATTTGAATTGGGATAAATGTTCTTTTATCAGATTTTTTGATCCATATTCATTTTTTTTAATTGGAATGAATACGTTCA
TTGAGTTTAATTAATATATTTTTTGGGTCTAAACTATACGTTTATTGAGTTTAATTAATATGTTCTTTAATGATCACCAGATTGATGA
TAATTAATTTTAGATTTTATCACCAAATGAGAAGGTAGTTTTTAATTATTTTTTATTCAATTTATATTTCATAATTTTGTTGTTGATGA
TGATGTTTTTAGATTATTATATTTGTTCATGGATCATTGTTAACGAATTCATCACCGAAAGAAAATGTAATTTTTTTTTTTAATTATTT
TAGTGTTTTTTTTTTAATTTGTGTTATTTTCGGATGTTGAAGATGAAGTTCTTTTGGATTGGGATAAATGTTCTTTTATCAGTTTTTT
TGATCCATATTCATTTTTTTTTAATTAGAATGAATACGTTCATTGAGTTTAATTAATATGTTATTTGGGTCTAAACTATATGTTCTTC
ATAGTCACAAACTATGTTCTTTGGATTTGAACTATATGTTCTTTACGTTACAAACTATGTTCATCTATTTGTCTATTTTTTTCAAAAA
AATATTATCTAATTGTGTATATGTATATTTTTAATCATCTAATTGTGTATATGTATAATTTTGTTTTATAATAGATCAGGATCATAAAG
GTTGATGAAGACGATATACTTTTGGGACCTCTTCTATTGATGATTGATTTTCCGATAGATTTAAAGAACATTCGCTATATTGATAA
AGAACATGATAGTATTATTTAAATAACATTATTTATATTTAACCAACATGTTAAAATAAAATTCAGGGAACATTTGACAATAAGTAT
GAACATTGTGTGACAATAAAGGTACACTAAAATTGCAATCAAAGAACATGGACATTTAAAATCATATAATGAACATCATAATAAAT
ACACATGACCAAAATGAATATTATAACAAAATATAAAAATATATAATTGGTTATTTACAGAATTTTTTTTAAAAAAAGAAAGAGAAC
AGGATTAAAAAAAAATATATTAGAATTTGAAATTTTGAAAATAAAATCTTCATAAAAAATAATTTTAGAGACAAAAATTATAGAAAAC
TGAATATTTTGAAATGATTTGACATTAAATACGTGGTAAAAATCAATTGGTGATTATCTTTTACCTTTTTTTTAAATTGATTCACCAA
AATTACCACGTTCTTTATATTTCAATGTTGTGTTCTTTTATAAAGTCGTGATGTTTATTACAAATATAAGTTATGTTCTTTCCGCTTT
TTATTTTAACTAGTTTTGATCCGGATTTACCATGCGCACGGTACACCCGAGTATACCAACCAACGATTACCTCCTTTCCAGCCAT
TCCGCCACCTGAACCGCCGCCTCTTGACATCTGCCTGACCAGCCGCCTGCTTTCGCGTCGCCGCCAGCAACTTCTGCCGGTAA
CCTCTACTATGTGGTTGTGGTGGTTGTGTGGAACAAGGTTGGTGGTTGGGGTGTTAGTTTGATGAGAGAGAAAATAAAAATAAA
AAAAAATAAAAATAAAAAAGGGGGAGAAAAAATGGGTTAGGGTTTAGTAAGGGTAATGATGACCCTTTGCTTGAAATGATGGCG
GTTTTGATGAATTTGGATGGCGGTATTTAACACCCCTTTATAACTGCATGAAAATCTCATTTTCAGAAATTTACCATGAGATCCAC
TCTAGTGGATTATTACAGTTAATTTCCTTACATATAAATCATAAAATAACTATCAAAGCTAGTCGAAGGGGAGTATATGAATAGTG
TGAATGAAGGTTATAGTGTTGCAAGTAAAAAAATGAGGGAGCTGAGGTATTATTTTTCTTTCTTACTAATATTTAAATAAATTTCTA
AGCTACTAACTATTTTTTATAATAATATAATATTCTCACTGTGCACTGCCTATTATTGCAATTAATCAAAAACTAGGAATTGTCAGT
ATATAAAATTTTGTTAAATAACGAAAATTTTGATTTTTAACACCACAAAAAAATTTTAAAAATTCGATTTTACCACCACTTGACGGAT
TCTTGGATGAACCCGTTAGTGGGGCCTACAATTCCCACATGTCATCATATAATTGGTTAAAAAAATAAAAAATCAAAATCCTAAAA
CTAACCCAGCCACCCCACCCCCACTGCTGATCGCCCCTGCCCCACCTCCAACACCCCTTTTCACAACCCTAGCCACTAGAAAC
TCCGCCACCTCCCTTTCTCCTACCCCAAAATCGGCAGCTTCCCCCAAACGGCCACCAAAAACGCCGAAAGTGGTCGAAATTGA
CCGGTTTAGGGTCGATATCGACCACTCAGGCCCTCAACCGGCTGATTTCGACCGTTAGTGACTGATTTCGTGGCCATTTTTGGG
AAAGGGAGGGGAGGGTTCCGGTGGGGCGAGTTCAAGCTAGGGGAGGGGGTGCGTCGGAGGTAGGGCAAGGAACGTCGGCT
GCGTTGGGTAGGGGTGGAGAAAAGGGTGGCTGGATTAGTTTTAGGCTTTTGTGAGAAGGGTCACTAAAGAAATTAAGGATAAA
AAAAATGGATTATATAGTTTGACAATTGAAAGAGTCAAAGAGTACATTAGTACCAAACTTTCTTTAGATCTTTGTCTACCGACTTTA
ACTCCTCAAATGATAGAGAATTATATAGCTCAAAAAATGAATGAGGACATAAAAGCCGCTATATAATAAATACTTTTTTTGTATGT
CTTTCAAACGTAATCTTGCATATTCAAAGGGAATCTAGTCAAAATTTGACCATCCCTTTTAAAAAAAAAAAAAAAAAAAAATATATG
GGCTTTCGAAGGAATCAATAAGATCATAAAGTTAAGCAAATACATAGATTCCCTTCAATGCACTCCACATTCTTATAACCGTGTTT
AAAACCTTTAGTGCTATCCACATCAAAAAGGCTAACTTGTTAAGAGGTGAAGATAATATTACAATGAAAAAAACATGTAATTTCGC
AAATATTAATCATCGTACCCTCTAGTTAATCGTATATTAATTAGGAGATGATTATAAAATTTCAAGAAAAATTCAAAAATTAATAAT
GTTCTCTCGTGACATATATGAATAAATGGTAATTATATAATGATTAAAACCACAAGTTTATTTTGTGGTTCCAACAGCAAAGAAAT
CGCTTAGCTTATTGAGAACATTATATATATGCCAAATCCACTAGAGTGTTGATACGTATGCACGGGGCAGCTTTTGACCATCTAT
GGGAACCAAGAAAGCATCCTCTTTTTATTCATCATTGCATGTAAGCAATATTAACCTGTGTGGAATACTAGTACATGATAAATCTA
TAACGACAAAGCCTGTTCCAACATACAAGTCATATTCGAGACCAAAAGTTGTACAATGGGATCACCAACCAGCTCAGGTAGCAT
ATTGCAACAATAAAGATAACTCACGGTCAAAATAAGTTCTAGAGTAATCTAGCCATTGACACCATACTCTTAAGCACAATGAAATT
AAACCATACCTTATATTGGCGTGTAATGCTCCCTTCTCTTAGCTTATTGATTGTATAAGCCAAAAGGGACCATTATTAGTGGCCTA
TAATCTCTAAAGAAGCCTTGATTAGAGCTTGTAAAAGTGGGGACAACTTAAAAGCTAAGGTATCATCAGAAATTATAGAGAATATT
GTCAATAGAATGGAAGTCACAAAGCCATATATACGTGCATGTTAAAGCTATGGAACCATAGCATGGACCATATATTCATTTCTCT
TTGACTTTGGGTATCTTTCAAAGTTCAAAAAATTATCTCTTGAGGCCCACCTCAGTCAAATGGCATACTCTAGTCTAGGCTGACAT
CCTCCGAACATTTCACTGCCTCTAATAGCTTGAGTCATAAATGCCTCTAATAGCTTGAGTCATAAGGTTGGTATTAAAATGTCTTT
ATAAAATGACAAAGAATTTTGATGATATTTTGCAATTGTTGGTATTAATGAAGAAGTATTATATTTTGGTATCATGGCAATACCATC
TAACCACAATTTAATACCAACAAATATTATTTGAGTCATTCATGACTCAAGCTATTAGAAGCAGAGAATTTCTCGACATTCCCCAT
GCTCATTTTCAAAAGTACACAAATCCCTCCCTTCCTAGCTCTCTTTCCACGACGTACAAATGGTAGCACATATTGTAGCTGATAC
GCGGCAAATTAAAACCAATGAAAAAGAGATACGCTGACATAATATGGTAGTAGATTATAGATTCTTTTGTTTCTTAATTGTAGAAA
CTTGAAATATAAAATAATAACCATTACATGCAAATTATTTATTTGTCGAGTTGTCATTTTAGCCACGTATAACTGCTAGTATTACTT
TGATTAAGCTGCAAGATTGACAAAAAGGATAGTAAGGAATATAACCCTATTCGAATGCACTGATCATTTTATTGCATGCGAACAA
AAATCGGTCCATGATGACATTATCCTTGAGGAATCTCAGATTTTTATCTTCCTTTTTGCTGCCTTTCAACTGATATAAATTTTGAGC
TTTGTAACCCTCAAACCTCAATCTTTTCTTACATTGTTATTGTCTACGCTCACACATCAAGAGCGCGAGCATTATTGAACTCCCTT
CAACCGACAACAAACCATCATGGACTACAGATCAATTGAGTCTTCTGAATCCTCAAGGCATTTTTCTACTCTATACATTCTCTATC
ATAAAATGTTTGCAGAAGTTTTTTTTTTTTTTTTTTTTTTTGTTAAACTTGTTGCATATTGCCATATATCATGATTTTATGTTTCATGT
TTATGTAAATATTGATGCATAGTTGTATTATCAATGTCAAGTAGACGGGTATAAACGTTACCAAAATATATCATCCAATCAATATGA
TTTGATCAAATTAAACAAGTTTGCTCGACCTACTATTAGTAATCTAATTATGTATGTTOTTAGTACATGTAATTGTGAGTTCAATGA
AGTCCAAAGTAGGAATATCTAACGTACTTTTAGCTTTGGAACTTAATTAAAAAAACAATTTCAGGAAAAAAAGAATGAAATGTTTA
TAAAATTCCTTATTTTCTTTCTTAAGAAACCCTAGATATGATATGTTTCTCCTCTCTTGTTCGTTGTCCCTATGATTTTGAGTTCATC
TCAACTCTGCTCGCTATATAACTTGGAAGAAAATTAATCCAATGTCTTCTTTAGTCTTCACTATAATAAACTCATGGAAAGTAATCA
AGTATATTTCTTTTTCCCTTTCTTCTACTTTCTATTTTGGTCACTTGCAAATTTAAGTCTTCTATTGCCTATCCTTTTCTTGTGTTCT
AGTTTTACTAATAATTATAGACAGATTCATTATTTTAAAAGATAATGAACATCGATCATAATACTTTTACATATTATTATCTCTCAAG
CTAATTTCGAGAGTTCTTTAAAGTCAAGTTTTGTTTCAGTATTATGTTGACTGAATTGAAATTATCTCATCACATTTATGTTCTTGTT
TAAAAATATAATTTCATTTAGTAGCTTATCATCTCATCTTGAAATGTTATCTAACATTAAAGCTTTATGTAATGCAGAAACAAATGT
GCTGCATGCTATAGACAATTTAACAGAAAGGAACATTTGGTGGATCACATGAGAACCTCCTTTCACTCTGTTCATGAACCTATGT
GTGGTGTTTGTAAAAAGCGTTGCCGATCCTTCGAATCATTAAGAGAACATCTTATTGGTAGGTTTATATCCTATAATATTACTATC
TCCGTTTCATATTATGTGCAACATTTATTAAAAACAGTTGTATGCTATGCAACAAATGTTTTCTTTCTTTTTTAAGCTGTCACTTCTC
GCTATCTATCTCCTCATTATCACATGCATCATTATCTTTCTCTCTCCATTTAACACTCACGGACAAATTTTGCCTATCTATATTGTT
TTCACAGGACCATTACCAAAGGTGGAATGCGCAAAGATATTTAGTAGTCGAGGATGCAACATATGCTTGACCATTTTAGATAGCC
CTTACACCCTCAGAATGCATCGAGGAGCATGTCAACTCTCTCGACCAAATGTAATGACTTTAGCTTGGAAAAACAAATGTAACAA
ATTAATAGTATTTCCATCAAAACTTTGTAAATTGAACCTTTTTTTTTTTTTTTTTATGCAGGCACTAATTTCTAGCATGGCAAACTTG
AAAATGTGTGACAATATGAAGATCGATTATGGTCGAGAAAGAAGTCCTAACGTAGTTGCGCTTGCATGCAAAATGGTAGGAGGT
GGTAATGACGGAACACTTGATATTTGTGCAAGGGTTTGCCTAACTGATGAATATGATAACATTTTGTTTCAAACATATGTCAAGC
CTCATATTCCAGTGACTAACTATAGGTAACTTTTATTTTCGACATTAGTTTCTCTACTAGCTTGATTTAAATTATOTTATACACGAC
TCATTCACTTATTGTATTTCGTGTGTAGATTTGAAACCACGGGTATCAGACCGGATTACTTGAGGGATGCAATGCCATTGAAGCA
GGTTCAAAGAAAAATTCAAGATTTCTTATGCAATGGAGAGCCGGTGTGGAAAATTCGATCAAGAGGAGGAAAGGCTAGGGTTCT
TGTTGGCCATGGACTAGATCATGACCTTGAGTGCCTAGGAATGGAATATCCCGCATTGATGCTTAGGTATGAACTATTTCCTTCG
TTTCTTAATATTTGCATCAATTAAATATACACGTTTTTCAATGCATCAATTATATTTAGATAATAATACATATTGAGATTAACTCACC
ATTAAAATAATAAAATTTATTTATGCTTCGTGTACATTATTAGTTGTAAAATATGGTCAAAGTTAGTATAATAAGAGTGTATAAGTTA
ATTGATACAAATATTAAGAAACAAAGGAAGTATATTGACAATTATTAATCACGTGCATATAAATGAGTTCATAACTAATATAAGTCA
TTTGATGGTTTGATTTAATTTGATTATATATAAGTGCTCAATATCTCTTTCTAATCAAACTTTGATGATATAAATTTGTTTGTTGGGA
ATTGGTAGAATTATATTGAGAAAAGTCAAGGTTGTTACACAAGGGAAATGATAAAAAAAGAATATATAGAGCACAAACAATTTGTA
GTTGTGAGGGTCCTTAGGGTTTTAAATATCTTGCAAAGAAACTTAATTGTAGATTCGTTCTATCTAGCAAGCTAAGTAAGTGATAT
ATATATATATATACTTATTAAAAAAAAAAAAAAAACCTTCTCGAATATTTTCTTTCAGTAAAATACATATGCTTCCTCCGTTTTTTTTT
TTTACTTGCAACACTTTGACTTCTACACTATTCATATACTCTAATTCGACTAGCTCTTATAATTAAAAGTAAAGGAAGTAATATTTA
AATTTTGGAGTATGCATCCCTAAACACTGTTGAATGATGACAATGAAAATAAGTACCATAAGCTTCAAAATGCATATACTAATGTG
GTATTTTGGTCTGCAGGGATACCTCAAAATATCCTCCTTTGATGAAAACAAGCAAGCTCAGCAACTCACTTAGATATCTAACACA
AGCATATTTAGGGCAAGTACCTCTTAAGTCTTAACTAAGTATATGGTTCTTTATATATGTTGTTTGTAAACTCGCTCTTTCATATTT
ACTGATAATATTTACGTTACAGTTACGAAATCCAGATTGGTGTCCAAGATCCTTATGAAGATTGTGTTGCTACAATGAAACTCTAC
ATGAGAATGAGGTCTCAAAATCATAAGGCAGAATATTATCCATTAGCCAGTGACCCACAAAATCGCAACAACTTTGCTCAATGGA
GGGAAGCTGAACTTGAGAAAATGACTCCAGATGAACTATTAGCAATATCAAGGTCCGATTACTATTGCTGGTGCTTAGACTTGAA
GGGATATATGTGA
SEQIDNO: 313
MRTSFHSVHEPMCGVCKKRCRSFESLREHLIGPLPKVECAKIFSSRGCNICLTILDSPYTLRMHRGACQLSRPNGLISSMANMKICDN
MKIDYGRERSPNVVALACKMVGGGNDGTLDICARVCLTDEYDNILFQTYVKPHIPVTNYRFETTGIRPDHLRDAMPLKQVQRKIQDFL
CNGEPVWKIRSRGGKARVLVGHGLDHDLECLGMEYPALMISYEIQMGVQDPYEDCVATMKLYMRMRSQNHKAEYYPLASDPQNRN
NFAQWREAELEKMTPDELLAISRSDYYCWCLDLKGYM
SEQIDNO: 314
ATGAGGACCTCCTTTCACTCTGTTCATGAACCTATGTGTGGTGTTTGCAAAAAGCGTTGTCGATCCTTCGAATCATTAAGAGAAC
ATCTTATTGGACCATTACCAAAGGTGGAATGCGCAAAGATCTTTAGTAGCCGAGGATGCAACATATGCTTGACCATTTTAGATAG
CCCTTACACCCTCAGAATGCATCGAGGAGCATGTCAACTCTCTCGCCCAAATGGACTAATTTCTAGCATGGCAAACATGAAAAT
ATGTGACAATATGAAGATTGATTATGGTCGAGAAAGAAGTCCTAACGTAGTTGCGCTTGCATGCAAAATGGTAGGAGGTGGTAA
TGACGGAACACTTGATATTTGTGCTAGGGTTTGCCTAACTGATGAATATGATAACATTTTGTTTCAAACATATGTTAAGCCTCATA
TTCCAGTGACTAACTATAGATTTGAAACCACGGGTATCAGACCGGATCACTTGAGGGATGCAATGCCATTGAAGCAGGTTCAAA
GAAAAATTCAAGATTTCTTATGCAATGGAGAGCCGGTGTGGAAAATTCGATCAAGAGGAGGAAAGGCTAGGGTTCTTGTTGGCC
ATGGACTAGATCATGACCTTGAGTGCCTAGGAATGGAATATCCCGCATTGATGATTAGTTACGAAATCCAGATGGGTGTCCAAG
ATCCTTATGAAGATTGTGTTGCTACAATGAAACTCTACATGAGAATGAGGTCTCAAAATCACAAGGCGGAATATTATCCATTAGC
TAGTGACCCACAAAATCGTAACAACTTTGCACAATGGAGGGAAGCTGAACTTGAGAAAATGACTCCAGATGAACTATTAGCAATA
TCAAGGTCTGATTACTATTGCTGGTGCTTAGACTTGAAGGGATATATGTGA
SEQIDNO: 315
ATGAGGACCTCCTTTCACTCTGTTCATGAACCTATGTGTGGTGTTTGCAAAAAGCGTTGTCGATCCTTCGAATCATTAAGAGAAC
ATCTTATTGGTAGGTTAATTTATATCTAATAATATAGTTACTATCTGTGTTTCATATTATCTGCAACATCTACTAAAAACAGTTATAT
CATTATCTTTCTATCTCCATTTAACACTCACGAAACAAATTTTGTCTATATAGGACCATTACCAAAGGTGGAATGCGCAAAGATCT
TTAGTAGCCGAGGATGCAACATATGCTTGACCATTTTAGATAGCCCTTACACCCTCAGAATGCATCGAGGAGCATGTCAACTCT
CTCGCCCAAATGTAACGACTTTTTATTAGCTTGGAAAAACAAATGTAACATATTAATAGTATTTCCATTGATAAAAACTTTGTAAAT
TAAAACCTATGCCCTTTTTTATACGCAGGGACTAATTTCTAGCATGGCAAACATGAAAATATGTGACAATATGAAGATTGATTATG
GTCGAGAAAGAAGTCCTAACGTAGTTGCGCTTGCATGCAAAATGGTAGGAGGTGGTAATGACGGAACACTTGATATTTGTGCTA
GGGTTTGCCTAACTGATGAATATGATAACATTTTGTTTCAAACATATGTTAAGCCTCATATTCCAGTGACTAACTATAGGTAACTT
TAATTTTCGACATAAATTTCTCTACTGCTCCCTCCGTTTCATAATTAGAAGTCTATTTCTCTTTATGATGTGAGTAATAGATGTTTG
AAATAGGGTTCTAATTATGAAACGGAGGGAGTATCTTGATTTAAACTATTTTATATGCCGACTCATTCACTTATTGTATTTCGTGT
GTAGATTTGAAACCACGGGTATCAGACCGGATCACTTGAGGGATGCAATGCCATTGAAGCAGGTTCAAAGAAAAATTCAAGATT
TCTTATGCAATGGAGAGCCGGTGTGGAAAATTCGATCAAGAGGAGGAAAGGCTAGGGTTCTTGTTGGCCATGGACTAGATCAT
GACCTTGAGTGCCTAGGAATGGAATATCCCGCATTGATGATTAGGTATGATGAACTACTTTCTCCAATCTCCATTTCTAAGTATTT
GCATGATCAATTGACTATATTTGTCAATGCACTACTTTGACTTTTTTTTTTTTTTTGAGACAATTAATATCTTTACTTATGCTTTATTA
AAATTATATTTTGAAAATATATATTGAGATTAGTTAATTCAATGACAATTAAAATCATGAAATTTATTATACTTTTTATACATTATCAT
TAGTGCTAAAATATGATCAAAGTTAGTATAAGAAGAGTATAAAAAGTCAATAAACGGAGGAAGTATATTGATAATGCATTATCACA
TACAAATAAATGAGTTCATAACTAATTACAGTCATTTGATGGTTTGATTTGATTGTATATAAGTACTCAATATCTCTCTTAAATCAA
ATTTAGATAATATTTGTTGGTTGGGAATGGTAGAATTATATTGAGGAAAGTACAAGGTTGTTACACAAGGGAGATTGTGAGGGTC
CTTGGGGTTTTAAATTTCTTGCAAGGAAACTTAATTGTAGATTTGTTCTATCTAGCTAGCAAGCTAAGTAAGTGATGTATATACTA
TAAAATGATTTATTTTTTTTTTAAAAAAAAAAAAAAAAAAAAAAACCTTTCTCCTTCAGTAAAATAGATATACTTTCTACGTTTTTTTT
TTACTTGCAATGCTTTGACTTTTACAATATTCATACTCTACTTTGACTAGCTCTAATAATTTATTGAATGATGACAATAAAAATAATA
AGTACCATAAGCTTCAAAATGCATGCATATACTAATGTGGTATATTATATTTTTGGTCAACAGGGATACCTCAAAATATCCTCCTT
TGATGAAAACAAGCAAGCTCAGCAATTCACTTAGATATCTAACACAAGCATATTTAGGGCAAGTACCTCTTAACTAAGTATACGG
TTCTTTATATATTTTGTTAGTAAACTCGCTCTTTCATATTTACTGATAATATTTATGTTACAGTTACGAAATCCAGATGGGTGTCCA
AGATCCTTATGAAGATTGTGTTGCTACAATGAAACTCTACATGAGAATGAGGTCTCAAAATCACAAGGCGGAATATTATCCATTA
GCTAGTGACCCACAAAATCGTAACAACTTTGCACAATGGAGGGAAGCTGAACTTGAGAAAATGACTCCAGATGAACTATTAGCA
ATATCAAGGTCTGATTACTATTGCTGGTGCTTAGACTTGAAGGGATATATGTGA
SEQIDNO: 316
MESRVESSETLRNKCAACYRQFNRIEHLVEHMRTSYHSSHEPMCGICKKHCRSFESLREHLIGPLPKQECRNIFITRGCKICLAILESP
YALRVHQDRCQLSGGNAGLLGRFANLGIRDNTEXGSTRGTQVVALACKMVGGGSDGSLDLCAKVCLTDEYDNIIFQSYVKPLLPVTN
YRYETTGIRPEYLRDAMPLRQVQKKIQDFLCNGEPMWKIRPRGGKARILVGHGLDHDLDSLQFEYPQGYCKIPSIDENKQAQQLTQV
SHTSISWASIQDPYEDCVATMKLYMRMRSQVHKVEAYPLASDPQNRNNFAAWRQNELERMSPDQMLEISRSDYYCWCLDS
SEQIDNO: 317
ATGGAGTCTAGAGTCGAATCATCAGAAACTCTGAGGAACAAGTGTGCAGCATGCTATCGACAGTTCAATCGGATCGAGCACTTA
GTGGAGCACATGAGAACCTCATACCACTCATCTCATGAACCCATGTGTGGAATTTGTAAGAAGCATTGCAGATCTTTTGAATCTC
TCAGAGAACATCTTATAGGGCCACTGCCAAAACAAGAGTGCAGAAACATATTCATCACTAGAGGATGCAAAATCTGCTTAGCCA
TCCTCGAAAGCCCGTATGCTCTTAGGGTTCACCAGGACAGATGCCAACTCTCTGGTGGAAATGCTGGATTACTTGGTCGCTTTG
CTAATCTGGGCATTCGTGACAATACTGAARGTGGTAGCACAAGAGGCACTCAAGTTGTTGCACTGGCTTGCAAAATGGTTGGTG
GAGGCAGCGATGGCTCCCTGGATCTCTGCGCAAAGGTCTGCCTCACTGATGAATATGACAACATCATCTTCCAGTCTTATGTCA
AGCCACTGCTTCCAGTCACAAACTATAGGTATGAAACAACTGGTATTCGTCCTGAATACTTGAGGGATGCAATGCCTTTGAGGC
AAGTGCAAAAGAAGATTCAAGATTTCCTCTGCAATGGGGAACCGATGTGGAAGATTCGACCCCGAGGTGGAAAAGCTAGGATT
CTTGTGGGCCACGGTTTAGATCATGACCTTGACTCCTTGCAGTTTGAATACCCACAAGGATACTGCAAAATACCCTCCATTGATG
AAAACAAGCAAGCTCAGCAACTCACTCAAGTATCTCACACAAGCATATCTTGGGCAAGCATTCAAGATCCTTATGAGGATTGTGT
TGCAACAATGAAGCTCTACATGAGAATGAGATCCCAAGTTCACAAAGTAGAGGCATACCCACTCGCTTCTGACCCGCAAAACCG
GAATAACTTCGCGGCGTGGCGCCAAAATGAGCTTGAGAGGATGAGCCCAGATCAAATGCTGGAAATCTCAAGGTCTGATTACT
ACTGCTGGTGCCTGGACTCTTAG
SEQIDNO: 318
ATGGAGTCTAGAGTCGAATCATCAGAAACTCTGAGGTTATCTCTCTCTCTCTCAACACACACGTAAATATCASTGCATGCACATT
TCTTTCAGCTTAATTAAGTTGAAATTAATTTTTCGATGAATCATGGATGATTAGTATGTAAACTAATGATGACAATATTATATATGT
GACGATTAATCAGGAACAAGTGTGCAGCATGCTATCGACAGTTCAATCGGATCGAGCACTTAGTGGAGCACATGAGAACCTCAT
ACCACTCATCTCATGAACCCATGTGTGGAATTTGTAAGAAGCATTGCAGATCTTTTGAATCTCTCAGAGAACATCTTATAGGTAA
CTAAAACAATTTATGCAGAACTGAGCTTATAGCCAAGTWAACTATTACWGTGKTTTCCTCTTTCTGCATCCAAGTTCAAATCCTT
CTCTCCGCTTAGATTAATTTAGAGTAAACTATATCACTTATATAAAAAACAGTTATCAATTACATAAACTAATATCCCAAATTTCTTT
TGCAAATCATAGTTCTATWTTCTTTTTCCAGGGCCACTGCCAAAACAAGAGTGCAGAAACATATTCATCACTAGAGGATGCAAAA
TCTGCTTAGCCATCCTCGAAAGCCCGTATGCTCTTAGGGTTCACCAGGACAGATGCCAACTCTCTGGTGGAAATGCTGTATTAA
TCCTCACACACTAGCTTATTAATCATGAACTTTTTGCCGAAACCCTATTTGTTATAAATTAAAATTCATTCCATATTGTATATTTCAG
GGATTACTTGGTCGCTTTGCTAATCTGGGCATTCGTGACAATACTGAARGTGGTAGCACAAGAGGCACTCAAGTTGTTGCACTG
GCTTGCAAAATGGTTGGTGGAGGCAGCGATGGCTCCCTGGATCTCTGCGCAAAGGTCTGCCTCACTGATGAATATGACAACAT
CATCTTCCAGTCTTATGTCAAGCCACTGCTTCCAGTCACAAACTATAGGTATATATGCATTTATATAGAGATTTATACTAACTAGT
ATGTACGTAAGTAGCGAATATATATAAGAAAGTGGTTTCCGTGGTCTACTCTTTATTCCTGACCGTCAGATGGAACAAAACAAAA
GGCAAAGATAGGGTGGAAATYGGACAAAGATTGTCTGCCCTCYCACTTCCGATGCCCTCYTGTTTTGTATGRTCACGGTTAAGY
CACGTTAACATTTTATATTGTTTTTTTATAGAGATAATAAGACAAAAATGAATAGTAATATAAAATGTTGATGTGGCTTAACCGTGA
CCACATAAACAGGAGGGCAYGRGAGGGCACCGGAAGTGGGAGGGCAGACAATCCTTGTCCGTCGAAATCATACTTTCTCAGTA
AAGATGTCATTTTTTTATGATTTAGCGATTTGACCGACCATTTTGTTGTATACTTGTATAATACAGGTATGAAACAACTGGTATTCG
TCCTGAATACTTGAGGGATGCAATGCCTTTGAGGCAAGTGCAAAAGAAGATTCAAGATTTCCTCTGCAATGGGGAACCGATGTG
GAAGATTCGACCCCGAGGTGGAAAAGCTAGGATTCTTGTGGGCCACGGTTTAGATCATGACCTTGACTCCTTGCAGTTTGAATA
CCCACAAGTAATGATTAGGTAATTCAACTTATTTTTCTTTCATCCAAACAAAAAACCTATTTATCATTTTATGTACAGAGAAAATTG
TTATTGACAATTAAAAAGTCTTAAAATAAATAAGATCACATATTGAGTTGCACACCTATTAATTGGCAGCAAATCATTTGTGTATGT
ACACACACGCGCACATCGTTTGTGTATGTACACACACACGCGCACACACACACGCGCGCACACACACAACCTTCCATTCCGAAT
TTCAATTATAATTTTAGTTCTAAATGTGACTGACTGTGTATAGGGATACTGCAAAATACCCTCCATTGATGAAAACAAGCAAGCTC
AGCAACTCACTCAAGTATCTCACACAAGCATATCTTGGGCAAGTACCCAACCCTACTATTAATTCCCTATATATAGATCAATTCTA
GCTACAAATAAGTTATTACTAATGCAATTTTCACATATAATCTATATAGGTATGAAATTCAAACAGGCATTCAAGATCCTTATGAG
GATTGTGTTGCAACAATGAAGCTCTACATGAGAATGAGATCCCAAGTTCACAAAGTAGAGGCATACCCACTCGCTTCTGACCCG
CAAAACCGGAATAACTTCGCGGCGTGGCGCCAAAATGAGCTTGAGAGGATGAGCCCAGATCAAATGCTGGAAATCTCAAGGTC
TGATTACTACTGCTGGTGCCTGGACTCTTAG
SEQIDNO: 319
MEYKVESTETLRNKCAACYRQFNRIEHLVEHMRTSYHSAHEPMCGICKKHCKYFESLREHLIGPLPKQECRNIFSTRGCKICLAILESP
DYLVALLIWGIRDNTESGSTGGTQVVALACKMVGGGSDGSLDLCAKVCLTDEYDNIIFQSYVMPLIPVTNYRYETTGIRPEYLRDAIPL
RQVQKKIQDFLCNGEPKWKIRLRSGRARILVGHGLDHDLDSLQVEYPQGYCKISSIVEIKQAQQLPQVSHTSISWASIQDPYEDCVAT
MKIYKRMRSQVHKVEAHPLASDTQNRNNFAAWRQNELERMSPDQMMEISRSDYNCWCLDSYSG
SEQIDNO: 320
ATGGAGTATAAAGTTGAATCAACAGAAACTCTGAGGAACAAGTGTGCAGCATGCTATCGACAATTCAATAGAATCGAGCACTTA
GTGGAGCACATGAGAACCTCATACCACTCAGCTCATGAACCCATGTGTGGAATTTGTAAGAAGCATTGCAAATATTTTGAATCTC
TCAGGGAACATCTTATAGGGCCATTGCCAAAACAAGAATGCAGAAATATATTCAGCACCAGAGGATGCAAAATCTGCTTAGCCA
TCCTCGAAAGCCCGGATTACTTGGTCGCTTTGCTAATCTGGGGCATTCGTGACAATACTGAAAGTGGTAGCACAGGAGGCACT
CAAGTTGTTGCACTTGCTTGCAAAATGGTTGGTGGTGGCAGCGATGGCTCACTGGATCTCTGCGCAAAGGTCTGCCTCACTGAT
GAATATGACAACATCATCTTTCAGTCTTATGTCATGCCACTGATTCCAGTCACAAACTATAGATATGAAACAACTGGTATTCGCCC
TGAATACTTGAGGGATGCAATCCCTTTGAGGCAAGTGCAAAAGAAGATCCAAGACTTCCTCTGCAATGGGGAACCAAAGTGGAA
GATTCGACTCCGAAGTGGAAGAGCTAGGATTCTTGTGGGTCACGGTTTGGATCATGACCTTGACTCTCTGCAGGTTGAATATCC
ACAAGGATACTGCAAAATATCCTCCATTGTTGAAATCAAGCAAGCTCAGCAACTCCCTCAAGTATCTCACACAAGCATATCTTGG
GCAAGCATTCAAGATCCTTATGAGGATTGTGTTGCAACAATGAAGATCTACAAGAGAATGAGATCCCAAGTTCACAAAGTAGAG
GCACACCCGCTCGCTTCTGACACTCAAAACCGGAATAACTTTGCGGCGTGGCGCCAAAATGAGCTTGAGAGGATGAGCCCAGA
TCAAATGATGGAAATCTCAAGGTCTGATTACAACTGCTGGTGCCTGGACTCTTATAGTGGCTGA
SEQIDNO: 321
ATGGAGTATAAAGTTGAATCAACAGAAACTCTGAGGTTATCTCTCTCTCTCTCTCTCAACACATACAGAAATATCACTGCATTCAC
ATTTCTTTCAGCTTAATTAAGTTGTAACTTGTAAGTAATTTTTTTGATTAATCATGGATGATTAGTATATAAACTAATGAGAATTATA
TATATGCGGTGATTAATCAGGAACAAGTGTGCAGCATGCTATCGACAATTCAATAGAATCGAGCACTTAGTGGAGCACATGAGA
ACCTCATACCACTCAGCTCATGAACCCATGTGTGGAATTTGTAAGAAGCATTGCAAATATTTTGAATCTCTCAGGGAACATCTTA
TAGGTAACTAAAACAAACTATGCAGATCAACTGAGCGTAGCCAAGTTGACTATAAACTGTGTTTTCTCTTTCTGCATCAAAGTTCA
AATCCTTCTCTCCATAGCTTAAATTAATTTAGAGTCAACTATATCTCTTATACAAAAAAACAGTTATTAATTACATAATCCCAAATTT
CTTTTGCAAATAATAATCCTATTATTTCTATTTTCAGGGCCATTGCCAAAACAAGAATGCAGAAATATATTCAGCACCAGAGGATG
CAAAATCTGCTTAGCCATCCTCGAAAGCCCGTATGCTCTTAGGGTTCACCAGGACAGATGCCAACTCTCTGGCGGCAATGCTGT
ATTAATCAGCACACACTACCTTATTAATTATGACCTTTTGCCCAAACCCTATTTGCTATAAATTTAAATTGATTCCATATAATGCAT
TTCAGGGATTACTTGGTCGCTTTGCTAATCTGGGGCATTCGTGACAATACTGAAAGTGGTAGCACAGGAGGCACTCAAGTTGTT
GCACTTGCTTGCAAAATGGTTGGTGGTGGCAGCGATGGCTCACTGGATCTCTGCGCAAAGGTCTGCCTCACTGATGAATATGA
CAACATCATCTTTCAGTCTTATGTCATGCCACTGATTCCAGTCACAAACTATAGGTATATATGCATTTATATGAAGAATTATACTAA
CTAATATGTAACGTATGTAGCGTATATATGTAGGGGAATGATTTCAGGGTCTCTTCTTTATTTCTAACTGTCGGATGGAACAAAAC
AAAAGACGAAGATATTGTGAAAATTGTACTTCCTACAATAAAGATGTTGTTGCTTTAAGAGAATATGGTCATCATTTCGGAGTGTG
ATTTAGCGATTGAACGGGTTCATTTTTTATATACATGACCGATCATTTTGCTTTATACTTGTATATATACAGATATGAAACAACTGG
TATTCGCCCTGAATACTTGAGGGATGCAATCCCTTTGAGGCAAGTGCAAAAGAAGATCCAAGACTTCCTCTGCAATGGGGAACC
AAAGTGGAAGATTCGACTCCGAAGTGGAAGAGCTAGGATTCTTGTGGGTCACGGTTTGGATCATGACCTTGACTCTCTGCAGGT
TGAATATCCACAAGTAATGATTAGGTAATTCAACTTATTTTTCTTTCATCCAAACAAAAAATATCCATTTTATAAAATCATCAGACT
CTCTTCGATCAATGAAAAGAAAATAAAAGACAACGAAGTGCACAATGACTATTTTAAAGTACTAATTAACAATTATCTATATATATT
TATAAAAGTATAGGATCACATATATACACATACAACTTTCCATTGCGAATTTCAATTGTAATTCTAGTTCTAAACGTGACTGACTGT
GTATAGGGATACTGCAAAATATCCTCCATTGTTGAAATCAAGCAAGCTCAGCAACTCCCTCAAGTATCTCACACAAGCATATCTT
GGGCAAGTACCCAACCCTACTATTAGTTCCCTATATATATAAATATAAATTCTAGCTACATATTAGTACTAATGCAATTTTACATAT
AATCTTATTAGGTATGACATTCAAACAGGCATTCAAGATCCTTATGAGGATTGTGTTGCAACAATGAAGATCTACAAGAGAATGA
GATCCCAAGTTCACAAAGTAGAGGCACACCCGCTCGCTTCTGACACTCAAAACCGGAATAACTTTGCGGCGTGGCGCCAAAAT
GAGCTTGAGAGGATGAGCCCAGATCAAATGATGGAAATCTCAAGGTCTGATTACAACTGCTGGTGCCTGGACTCTTATAGTGGC
TGA
SEQIDNO: 322
MDYRTESSETLRNKCAACFRQFNRLEHLVEHMRTSYHSVHEPVCGICKKHCRSFESLREHLIGPLPKQECKNVFNNRGCRFCLAILD
GPNARRLHQERCQMVSSATTGLNARLANLGVRDSLTIDNTHTRDPQVVAIACKMVGGGSDGSLDLCGRVCIIDEYENIIFHAYVKPPIP
VTSYRYETTGIRPEHLRDAIPLKQVQRKIQDFLCNGEPMWKIRPRGSRARILVGHGLDHDLDRLQVEYPAIMTRDTAKYPPLMKTSKL
SNSLKYLTQAYLGYDIQIGIQDPYDDCVATMRLYMRMKSQAHKREDYPLASDPQNRNNYASWRQTELERMSPEEMLAISRSDYYCW
CLDR
SEQIDNO: 323
ATGGACTACAGAACGGAGTCTTCAGAAACCCTAAGGAACAAGTGTGCAGCATGCTTCAGACAGTTCAACAGATTGGAGCACCT
GGTTGAGCACATGAGAACTTCATATCATTCGGTTCATGAACCCGTGTGTGGAATTTGTAAGAAACATTGCAGATCTTTTGAATCT
CTGAGGGAACATCTTATAGGGCCACTGCCAAAGCAAGAGTGCAAAAACGTATTCAACAACAGAGGATGCAGATTCTGTTTAGCC
ATCCTCGATGGCCCTAACGCTCGTAGGCTTCACCAAGAAAGATGCCAGATGGTCTCAAGTGCAACCACTGGACTGAATGCTCG
CTTAGCCAACTTAGGCGTTCGAGACAGCCTAACCATTGACAATACTCATACAAGAGATCCGCAAGTCGTAGCAATAGCTTGCAA
AATGGTTGGTGGAGGCAGTGATGGCTCTCTTGACCTTTGCGGAAGGGTCTGCATCATTGATGAATATGAAAACATTATCTTCCAT
GCTTATGTTAAGCCGCCGATTCCGGTCACAAGTTATAGGTATGAAACAACAGGCATTAGGCCAGAACATCTCCGCGATGCAATT
CCACTGAAGCAAGTTCAAAGGAAGATTCAAGATTTCCTTTGCAATGGGGAACCAATGTGGAAAATTAGACCTAGAGGTAGCAGA
GCTAGGATTCTAGTGGGTCATGGCTTGGATCACGATCTTGATCGTTTGCAAGTAGAATATCCAGCAATAATGACAAGGGATACT
GCAAAATATCCTCCACTGATGAAGACAAGCAAGCTTAGCAATTCTCTCAAATATTTAACACAAGCATACCTAGGATATGACATTC
AAATTGGTATACAAGACCCGTACGATGATTGTGTTGCAACAATGAGGTTGTACATGAGAATGAAATCTCAAGCTCATAAGAGAGA
GGACTATCCACTTGCTTCTGACCCGCAAAACAGAAATAACTATGCATCATGGAGGCAAACTGAGCTTGAGAGGATGAGTCCTGA
AGAAATGCTAGCAATCTCAAGGTCTGATTACTACTGTTGGTGCTTGGACCGATGATCTGCAAATGGTAGGGCGTGGTAGCCAGA
GGAACAAAATTGATGCGGGATATTGAAGAGGCTTCTAGTTAAAC
SEQIDNO: 324
ATGGACTACAGAACGGAGTCTTCAGAAACCCTAAGGTATAGACTACCCTCGTACATCCCTTTTTACTCCTCAACACCCACAATCA
GCATATGATCTTTCTACATGAAATCGATTGAATAAAATTGTTCCGTAATAATTAGTAACTTGATTGATCTTAATTTATTACCACAAT
CAGGAACAAGTGTGCAGCATGCTTCAGACAGTTCAACAGATTGGAGCACCTGGTTGAGCACATGAGAACTTCATATCATTCGGT
TCATGAACCCGTGTGTGGAATTTGTAAGAAACATTGCAGATCTTTTGAATCTCTGAGGGAACATCTTATAGGTAAATTTACTTTCA
ATTTGTCCATGGATTATTTTGTAACTTCCTATATAAGTTTAGTTTATCAATCAGCAATCCTGATATTCGCAATACAATTAATTACAG
GGCCACTGCCAAAGCAAGAGTGCAAAAACGTATTCAACAACAGAGGATGCAGATTCTGTTTAGCCATCCTCGATGGCCCTAACG
CTCGTAGGCTTCACCAAGAAAGATGCCAGATGGTCTCAAGTGCAACCACTGTATTACTCTTTTAATTTACCTTGCAATACTTATTG
TTAAATATTCATACTTAATTAATCAGATCAAATTGATCTTATTGTCAACTTCACGTGTTCTAGGGACTGAATGCTCGCTTAGCCAA
CTTAGGCGTTCGAGACAGCCTAACCATTGACAATACTCATACAAGAGATCCGCAAGTCGTAGCAATAGCTTGCAAAATGGTTGG
TGGAGGCAGTGATGGCTCTCTTGACCTTTGCGGAAGGGTCTGCATCATTGATGAATATGAAAACATTATCTTCCATGCTTATGTT
AAGCCGCCGATTCCGGTCACAAGTTATAGGTACCAATATGCATATACTTATGTATATATATACACATTTTGATGATTTCAGGAGCA
CAAATTAACTGTACTTTTAGTAAATCTTACATTCTTGAAACTTGTGTCCTAGGTATGAAACAACAGGCATTAGGCCAGAACATCTC
CGCGATGCAATTCCACTGAAGCAAGTTCAAAGGAAGATTCAAGATTTCCTTTGCAATGGGGAACCAATGTGGAAAATTAGACCT
AGAGGTAGCAGAGCTAGGATTCTAGTGGGTCATGGCTTGGATCACGATCTTGATCGTTTGCAAGTAGAATATCCAGCAATAATG
ACAAGGTAAATTTAAGTTGAAATTAAACATGCCAGCCACAAAACTTTATTACCATGAAACTCTTATGATAATTAATCTGCTAAGAA
AATGTATACATAATGCTCTTATCATTATCAGGGATACTGCAAAATATCCTCCACTGATGAAGACAAGCAAGCTTAGCAATTCTCTC
AAATATTTAACACAAGCATACCTAGGGTAAGTGCCATATATGTTTGTACATTTTTTTCCCCCAAACTTTCTAGATAAATGATTTTTA
TATATTACTCTCCATAATTCTCTATGCAGATATGACATTCAAATTGGTATACAAGACCCGTACGATGATTGTGTTGCAACAATGAG
GTTGTACATGAGAATGAAATCTCAAGCTCATAAGAGAGAGGACTATCCACTTGCTTCTGACCCGCAAAACAGAAATAACTATGCA
TCATGGAGGCAAACTGAGCTTGAGAGGATGAGTCCTGAAGAAATGCTAGCAATCTCAAGGTCTGATTACTACTGTTGGTGCTTG
GACCGATGATCTGCAAATGGTAGGGCGTGGTAGCCAGAGGAACAAAATTGATGCGGGATATTGAAGAGGCTTCTAGTTAAAC
SEQIDNO: 325
MDTEAELPKRSTARHKCVACYKQFKRKDHLIEHMKISYHSVHQPKCAVCQKLSKSFESLREHLTGPLSKAHCSGIFSDRGCNLCMNIF
DSPSSLIKHKEACSLSAPVPFEKTLSNAESQKKISGAIDEKRTCRGPKAVAMDCEMVGGGSNGTLDLCARVCLVDEDENVIFHTYVQP
QLPVTNYRYEVTGLTEEDIKNAMPLKEVKDKILEILNNGESTGRLMLDDGKARLLVGHGLEHDLDSLRMNYPDHMLRDTAKYRPLMKT
NLVSHSLKYLTRTYLGYDIQSGVHDPYEDCVSVMRLYKRFRRQDHQVEEIGNQNTTGSFDSYKYKELEKMSPNELYQISKSDYRCW
CLD
SEQIDNO: 326
TGAAATTTCCGAGTCATCAGGTGTTGAAATGGACACTGAAGCGGAGCTTCCGAAAAGGTCAACGGCAAGGCACAAATGTGTTG
CGTGCTACAAACAATTTAAGCGAAAGGATCATCTTATTGAGCACATGAAAATCTCATACCATTCAGTTCATCAGCCAAAATGTGC
TGTCTGTCAAAAACTCTCTAAATCTTTTGAATCTCTGCGGGAACATCTTACTGGTCCATTATCAAAAGCACATTGTTCGGGGATTT
TCTCTGACAGAGGGTGCAATCTTTGTATGAATATTTTTGATAGCCCCAGTTCTCTTATCAAGCATAAAGAAGCATGTTCCCTTTCT
GCACCTGTTCCCTTTGAAAAAACACTGTCTAATGCAGAATCTCAAAAGAAAATTTCAGGGGCAATTGATGAAAAGCGCACATGCA
GAGGTCCCAAAGCAGTTGCTATGGACTGTGAAATGGTTGGTGGTGGAAGCAATGGAACACTTGATCTTTGTGCTAGAGTTTGCC
TTGTTGATGAAGATGAGAATGTAATTTTTCACACATATGTTCAACCCCAACTTCCTGTCACTAACTACAGATATGAAGTAACTGGG
TTGACTGAAGAGGATATAAAAAATGCCATGCCTCTTAAAGAAGTGAAGGATAAAATTTTGGAAATTTTGAACAATGGAGAGTCTA
CCGGGAGGCTTATGTTGGATGATGGAAAGGCCAGACTTCTTGTGGGTCATGGTCTAGAGCATGATTTGGATAGCTTGAGGATG
AATTACCCTGATCACATGCTGAGGGATACTGCAAAATATCGTCCATTGATGAAGACAAATCTGGTTAGCCACTCGCTCAAGTACC
TCACCAGAACGTATCTAGGGTATGATATACAGTCTGGGGTGCATGATCCATACGAAGATTGTGTATCTGTCATGAGACTGTACA
AGAGATTCCGCAGACAAGATCATCAGGTAGAAGAAATTGGAAACCAAAATACTACCGGCAGTTTTGATTCTTACAAATACAAGGA
GCTTGAGAAGATGAGCCCAAATGAACTGTACCAGATATCAAAATCAGACTATAGATGCTGGTGCTTGGATTAGTATGGAGCCTT
AGCTTGTGTACCTCTGCTTTCTTCATCTCTATGTATATAGCAATTTTTAT
SEQIDNO: 327
TGAAATTTCCGAGTCATCAGGTGTTGAAATGGACACTGAAGCGGAGCTTCCGAAAAGGTCAACGGCAAGGTAACACTCTCTCAA
TTACATTTTGCTAAAAGAGGCAACGGTCGATACAGCAAAAATGAGGGTTTTGACTTTTTGAGAATAATTAGTTAATGCAATTTTGA
GCTATTTACCTTTTTGGGTCATCAGAATTTACCCTTCTTATAGTTATGTACTCGTCTTCTTAGCTTTGTAAAGTCTAATGGGTGATT
TTGTCAGCTCTGGTGATTGCATTTGCTGTGTCGGTGCTTCGTTGTTTTTGTGTGCTACACTTGTTGAGACAATGGTCATGGGTAA
TGTGACTCCTGTGCTTACATTACTTTCAGGCACAAATGTGTTGCGTGCTACAAACAATTTAAGCGAAAGGATCATCTTATTGAGC
ACATGAAAATCTCATACCATTCAGTTCATCAGCCAAAATGTGCTGTCTGTCAAAAACTCTCTAAATCTTTTGAATCTCTGCGGGAA
CATCTTACTGGTAAAATATATTTTCATGTTCATTCTGATTGGTCCATTCGTCAGTTGCTTATTTTGTTTTCCTTCTTATAGGTTCTTA
TTTTATTTTCCTTCTTATAGGTCCATTATCAAAAGCACATTGTTCGGGGATTTTCTCTGACAGAGGGTGCAATCTTTGTATGAATA
TTTTTGATAGCCCCAGTTCTCTTATCAAGCATAAAGAAGCATGTTCCCTTTCTGCACCTGTTCCCTTTGTAAGTTGATTATTGAAT
TTTTAGGGTTGCCGCTAGGAAACTTCTAGGATTGTTATCTCATGTAGTTTTTAAACCTTTTGACAATCAATTGCAGAACATCTGAT
CATTTCCTAGACATTCACACTTTGAATATTTTGTTGATTGCCGCAGGAAAAAACACTGTCTAATGCAGAATCTCAAAAGAAAATTT
CAGGGGCAATTGATGAAAAGCGCACATGCAGAGGTCCCAAAGCAGTTGCTATGGACTGTGAAATGGTTGGTGGTGGAAGCAAT
GGAACACTTGATCTTTGTGCTAGAGTTTGCCTTGTTGATGAAGATGAGAATGTAATTTTTCACACATATGTTCAACCCCAACTTCC
TGTCACTAACTACAGGCATTTCCCTGCCCTACATTGTTTTTGATTCTGCAAATTAATCATTAGGAAGAACCTGCTGATCATTGATA
TATCTTCGTAAATAATTTCAGATATGAAGTAACTGGGTTGACTGAAGAGGATATAAAAAATGCCATGCCTCTTAAAGAAGTGAAG
GATAAAATTTTGGAAATTTTGAACAATGGAGAGTCTACCGGGAGGCTTATGTTGGATGATGGAAAGGCCAGACTTCTTGTGGGT
CATGGTCTAGAGCATGATTTGGATAGCTTGAGGATGAATTACCCTGATCACATGCTGAGGTAATATAAATATTTTAAAGATTTTTG
ACCTGTCTAATTGATTTAAGTTCACTTTCATTGAAAGATACATGATAAAAAGGATGGATTGTTATTTGAATCGGACAAATGTCATA
ATATGGTTCAAATCACCCACTCAGCTGGTTATCTATGTTCAATTCAAAGTAAAATGTGTTTATAGATCTTCTCAATCTGCAATACA
ATCAAACTTGATTGTGATTTGGGATCTGGAAATGAGAATCACACTTCTTTTAAAACAATCTTGTGATGTATCTATGATTACCTCCTT
TACCTTATTTCCTGGGCTTAAACTTCAAGTCTTCTCCAGCAAAGGCCACCAAACTCGAGCAGCCACAGTTATGGTAAAAGTTTTG
ATGAAATTTCTACTAGTAGCATTTAAACTTAGCTTCAAAAGTTTTACTTGGAGAAAAATAACTCTGAACTCTGTTTGTATCTAGTTG
CATTGGTTTCATAAGTTTCACTTGGTGAAAAAATAAACCTGAACTCTGTTTGTATCTGGTTTCATGTGTTTTGGCTCTCACAGTTTT
GATTTCAATATTTTAAGACATTTTCGATTATCATATATTTTGTCTATGCAGCTGTATTGTTGCATTGAAGCATGGCCTTTTTTTTTTG
CGCCTTAAAATAACCTTTTCTTTGTGTAGGGATACTGCAAAATATCGTCCATTGATGAAGACAAATCTGGTTAGCCACTCGCTCA
AGTACCTCACCAGAACGTATCTAGGGCAAGTTATTTTTGCTTTCAGCACCCATCCTCATCACTAACACCCCCACCCCCTCTCCCT
TTAATTTTTTAAATTTTCTTTGTTATCCTGAAGTTTCTTGTTCATGTGGAGCTGCTATTGATATTTCTTTTCTTTTACAAGGGAAAAA
GGAAAGAGGAAACTTTTAACTGATTCTAACATTTCACTATTCCACTGTTAAACTATAAAGGTTCTTGGATGCTGTTTATGTTAGAA
AGTCTCGTAACTTTTTTAAAATTTATAGTTGATGTGATAGGGGAAGCAAGAATTCCTAAAGAAGGTCAAAGAAGAAATTTAGTAAA
ATGAAAGGAAAACAGTCTTTTGTTCCCATGCAATATCTATATGCATTTTATGATTTCAAATAACACGTCGGCAGAGTATGGTATGG
TCGGCCACTTGGTGTCTATTCAATGTTTGGAGTTCTGCGATCACTAATGTAATCTGTAAGAAGGATAGAAAATCACCGTATTTATT
TGCTTCACAGGTATGATATACAGTCTGGGGTGCATGATCCATACGAAGATTGTGTATCTGTCATGAGACTGTACAAGAGATTCC
GCAGACAAGATCATCAGGTAGAAGAAATTGGAAACCAAAATACTACCGGCAGTTTTGATTCTTACAAATACAAGGAGCTTGAGAA
GATGAGCCCAAATGAACTGTACCAGATATCAAAATCAGACTATAGATGCTGGTGCTTGGATTAGTATGGAGCCTTAGCTTGTGTA
CCTCTGCTTTCTTCATCTCTATGTATATAGCAATTTTTAT
SEQIDNO: 328
MDTEAELPKRSTARHKCVACYKQFKRKDHLIEHMKISYHSVHQPKCAVCQKLSKSFESLREHLTGPLSKAHCSGIFSDRGCNLCMNIF
DSPSSLIKHKEACSLSAPVPFKISGAIDEKRTCRGPKAVAMDCEMVGGGSNGTLDLCARVCLVDEDENVIFHTYVQPQLPVTNYRYEV
TGLTEEDIKNAMPLKEVKDKILEILNNGESTGRLMLDDGKARLLVGHGLEHDLDSLRMNYPDHMLRDTAKYRPLMKTNLVSHSLKYLT
RTYLGYDIQSGVHDPYEDCVSVMRLYKRFRRQDHQVEEIGNQNTTGSFDSYKYKELEKMSPNELYQISKSDYRCWCLD
SEQIDNO: 329
TGAAATTTCCGAGTCATCAGGTGTTGAAATGGACACTGAAGCGGAGCTTCCGAAAAGGTCAACGGCAAGGCACAAATGTGTTG
CGTGCTACAAACAATTTAAGCGAAAGGATCATCTTATTGAGCACATGAAAATCTCATACCATTCAGTTCATCAGCCAAAATGTGC
TGTCTGTCAAAAACTCTCTAAATCTTTTGAATCTCTGCGGGAACATCTTACTGGTCCATTATCAAAAGCACATTGTTCGGGGATTT
TCTCTGACAGAGGGTGCAATCTTTGTATGAATATTTTTGATAGCCCCAGTTCTCTTATCAAGCATAAAGAAGCATGTTCCCTTTCT
GCACCTGTTCCCTTTAAAATTTCAGGGGCAATTGATGAAAAGCGCACATGCAGAGGTCCCAAAGCAGTTGCTATGGACTGTGAA
ATGGTTGGTGGTGGAAGCAATGGAACACTTGATCTTTGTGCTAGAGTTTGCCTTGTTGATGAAGATGAGAATGTAATTTTTCACA
CATATGTTCAACCCCAACTTCCTGTCACTAACTACAGATATGAAGTAACTGGGTTGACTGAAGAGGATATAAAAAATGCCATGCC
TCTTAAAGAAGTGAAGGATAAAATTTTGGAAATTTTGAACAATGGAGAGTCTACCGGGAGGCTTATGTTGGATGATGGAAAGGC
CAGACTTCTTGTGGGTCATGGTCTAGAGCATGATTTGGATAGCTTGAGGATGAATTACCCTGATCACATGCTGAGGGATACTGC
AAAATATCGTCCATTGATGAAGACAAATCTGGTTAGCCACTCGCTCAAGTACCTCACCAGAACGTATCTAGGGTATGATATACAG
TCTGGGGTGCATGATCCATACGAAGATTGTGTATCTGTCATGAGACTGTACAAGAGATTCCGCAGACAAGATCATCAGGTAGAA
GAAATTGGAAACCAAAATACTACCGGCAGTTTTGATTCTTACAAATACAAGGAGCTTGAGAAGATGAGCCCAAATGAACTGTACC
AGATATCAAAATCAGACTATAGATGCTGGTGCTTGGATTAGTATGGAGCCTTAGCTTGTGTACCTCTGCTTTCTTCATCTCTATGT
ATATAGCAATTTTTAT
SEQIDNO: 330
TGAAATTTCCGAGTCATCAGGTGTTGAAATGGACACTGAAGCGGAGCTTCCGAAAAGGTCAACGGCAAGGTAACACTCTCTCAA
TTACATTTTGCTAAAAGAGGCAACGGTCGATACAGCAAAAATGAGGGTTTTGACTTTTTGAGAATAATTAGTTAATGCAATTTTGA
GCTATTTACCTTTTTGGGTCATCAGAATTTACCCTTCTTATAGTTATGTACTCGTCTTCTTAGCTTTGTAAAGTCTAATGGGTGATT
TTGTCAGCTCTGGTGATTGCATTTGCTGTGTCGGTGCTTCGTTGTTTTTGTGTGCTACACTTGTTGAGACAATGGTCATGGGTAA
TGTGACTCCTGTGCTTACATTACTTTCAGGCACAAATGTGTTGCGTGCTACAAACAATTTAAGCGAAAGGATCATCTTATTGAGC
ACATGAAAATCTCATACCATTCAGTTCATCAGCCAAAATGTGCTGTCTGTCAAAAACTCTCTAAATCTTTTGAATCTCTGCGGGAA
CATCTTACTGGTAAAATATATTTTCATGTTCATTCTGATTGGTCCATTCGTCAGTTGCTTATTTTGTTTTCCTTCTTATAGGTTCTTA
TTTTATTTTCCTTCTTATAGGTCCATTATCAAAAGCACATTGTTCGGGGATTTTCTCTGACAGAGGGTGCAATCTTTGTATGAATA
TTTTTGATAGCCCCAGTTCTCTTATCAAGCATAAAGAAGCATGTTCCCTTTCTGCACCTGTTCCCTTTGTAAGTTGATTATTGAAT
TTTTAGGGTTGCCGCTAGGAAACTTCTAGGATTGTTATCTCATGTAGTTTTTAAACCTTTTGACAATCAATTGCAGAACATCTGAT
CATTTCCTAGACATTCACACTTTGAATATTTTGTTGATTGCCGCAGGAAAAAACACTGTCTAATGCAGAATCTCAAAAGAAAATTT
CAGGGGCAATTGATGAAAAGCGCACATGCAGAGGTCCCAAAGCAGTTGCTATGGACTGTGAAATGGTTGGTGGTGGAAGCAAT
GGAACACTTGATCTTTGTGCTAGAGTTTGCCTTGTTGATGAAGATGAGAATGTAATTTTTCACACATATGTTCAACCCCAACTTCC
TGTCACTAACTACAGGCATTTCCCTGCCCTACATTGTTTTTGATTCTGCAAATTAATCATTAGGAAGAACCTGCTGATCATTGATA
TATCTTCGTAAATAATTTCAGATATGAAGTAACTGGGTTGACTGAAGAGGATATAAAAAATGCCATGCCTCTTAAAGAAGTGAAG
GATAAAATTTTGGAAATTTTGAACAATGGAGAGTCTACCGGGAGGCTTATGTTGGATGATGGAAAGGCCAGACTTCTTGTGGGT
CATGGTCTAGAGCATGATTTGGATAGCTTGAGGATGAATTACCCTGATCACATGCTGAGGTAATATAAATATTTTAAAGATTTTTG
ACCTGTCTAATTGATTTAAGTTCACTTTCATTGAAAGATACATGATAAAAAGGATGGATTGTTATTTGAATCGGACAAATGTCATA
ATATGGTTCAAATCACCCACTCAGCTGGTTATCTATGTTCAATTCAAAGTAAAATGTGTTTATAGATCTTCTCAATCTGCAATACA
ATCAAACTTGATTGTGATTTGGGATCTGGAAATGAGAATCACACTTCTTTTAAAACAATCTTGTGATGTATCTATGATTACCTCCTT
TACCTTATTTCCTGGGCTTAAACTTCAAGTCTTCTCCAGCAAAGGCCACCAAACTCGAGCAGCCACAGTTATGGTAAAAGTTTTG
ATGAAATTTCTACTAGTAGCATTTAAACTTAGCTTCAAAAGTTTTACTTGGAGAAAAATAACTCTGAACTCTGTTTGTATCTAGTTG
CATTGGTTTCATAAGTTTCACTTGGTGAAAAAATAAACCTGAACTCTGTTTGTATCTGGTTTCATGTGTTTTGGCTCTCACAGTTTT
GATTTCAATATTTTAAGACATTTTCGATTATCATATATTTTGTCTATGCAGCTGTATTGTTGCATTGAAGCATGGCCTTTTTTTTTTG
CGCCTTAAAATAACCTTTTCTTTGTGTAGGGATACTGCAAAATATCGTCCATTGATGAAGACAAATCTGGTTAGCCACTCGCTCA
AGTACCTCACCAGAACGTATCTAGGGCAAGTTATTTTTGCTTTCAGCACCCATCCTCATCACTAACACCCCCACCCCCTCTCCCT
TTAATTTTTTAAATTTTCTTTGTTATCCTGAAGTTTCTTGTTCATGTGGAGCTGCTATTGATATTTCTTTTCTTTTACAAGGGAAAAA
GGAAAGAGGAAACTTTTAACTGATTCTAACATTTCACTATTCCACTGTTAAACTATAAAGGTTCTTGGATGCTGTTTATGTTAGAA
AGTCTCGTAACTTTTTTAAAATTTATAGTTGATGTGATAGGGGAAGCAAGAATTCCTAAAGAAGGTCAAAGAAGAAATTTAGTAAA
ATGAAAGGAAAACAGTCTTTTGTTCCCATGCAATATCTATATGCATTTTATGATTTCAAATAACACGTCGGCAGAGTATGGTATGG
TCGGCCACTTGGTGTCTATTCAATGTTTGGAGTTCTGCGATCACTAATGTAATCTGTAAGAAGGATAGAAAATCACCGTATTTATT
TGCTTCACAGGTATGATATACAGTCTGGGGTGCATGATCCATACGAAGATTGTGTATCTGTCATGAGACTGTACAAGAGATTCC
GCAGACAAGATCATCAGGTAGAAGAAATTGGAAACCAAAATACTACCGGCAGTTTTGATTCTTACAAATACAAGGAGCTTGAGAA
GATGAGCCCAAATGAACTGTACCAGATATCAAAATCAGACTATAGATGCTGGTGCTTGGATTAGTATGGAGCCTTAGCTTGTGTA
CCTCTGCTTTCTTCATCTCTATGTATATAGCAATTTTTAT
SEQIDNO: 331
MDYRVESSETLRNKCAACYRQFNKIEHLVEHMRTSYHSAHEPTCGICKKHCRSFESLREHLIGPLPKQECRNIFSTRGCKFCLAILDS
PYALRVHQDRCQLSGVNAGLLGRFANLGIRDNTENGSTRGTQVVALACKMVGGGSDGSLDLCAKVCLIDEYENIIFQSYVKPLLPVTN
YRYETTGIRPEYLRDAMPLRQVQKKIQDFLCNGEPMWKIRPRGGKARILVGHGLDHDLDSLQVEYPQVMIRDTAKYPPLMKTSKLSN
SLKYLTQAYLGYDIQTGIQDPYEDCVATMKLYMRMRSQVHKTEAYPLASDPQNRNNFASWRQNELERMNPEQMLEASRSDYYCWC
LDSRDM
SEQIDNO: 332
AAAATCCAAAACAAAGGGATAACAATATTAATTGCTTTATTTTTCTTCAAGGAATCACGTATCATCAATCTCTCTCTAGATGCTTAC
ACTCCCACTCAGAAGCTATTCTCTTCCTCCTATCGTGGACTGCTATAAATACCTTCCATTCCCTCCACCTTTCCCTTCAAGTCTTG
TTCAGCTTCCTTAATTAATTACCTTTTTGTTTGAGTATACTAGTCTTTCAACCATCATGGACTACAGAGTTGAGTCTTCAGAAACTC
TGAGGAACAAGTGTGCGGCATGCTACAGACAATTCAACAAAATCGAGCACTTAGTGGAGCACATGAGAACCTCATATCACTCAG
CTCATGAACCCACATGTGGAATCTGTAAGAAACATTGCAGATCCTTTGAATCTCTCAGGGAACATCTTATAGGGCCATTGCCAAA
ACAAGAATGCAGGAATATATTCAGCACCAGAGGATGCAAATTCTGCTTAGCTATCCTTGACAGCCCTTATGCTCTCAGGGTTCA
CCAGGACAGATGCCAACTCTCTGGTGTAAATGCTGGCCTACTTGGTCGCTTTGCTAATTTGGGCATTCGTGACAATACTGAAAA
TGGTAGCACAAGAGGCACCCAAGTTGTTGCACTTGCTTGCAAAATGGTTGGTGGGGGCAGTGACGGCTCCCTGGATCTCTGTG
CAAAGGTCTGCCTCATCGACGAATACGAAAACATCATCTTCCAGTCTTATGTCAAGCCACTACTTCCAGTCACAAACTATAGGTA
TGAAACAACTGGCATTCGTCCTGAATACTTAAGGGATGCAATGCCTCTGAGGCAAGTGCAAAAGAAGATTCAAGACTTCCTCTG
CAATGGGGAACCAATGTGGAAGATTCGACCTAGAGGCGGAAAAGCTAGGATTCTTGTGGGCCATGGTTTGGATCATGATCTTG
ACTCTTTGCAGGTGGAATATCCACAAGTAATGATCAGGGATACTGCAAAATACCCTCCATTGATGAAAACAAGCAAGCTCAGCA
ACTCACTCAAGTATCTAACACAAGCATATCTTGGGTATGACATTCAAACTGGCATTCAAGACCCTTATGAGGATTGTGTTGCAAC
AATGAAGCTCTACATGAGAATGCGATCCCAAGTTCACAAGACAGAGGCTTACCCACTAGCTTCTGACCCACAGAACAGGAACAA
CTTTGCATCGTGGCGCCAAAATGAGCTCGAGAGGATGAACCCAGAACAAATGCTGGAAGCCTCAAGGTCTGATTACTATTGTTG
GTGTCTGGACTCCAGGGATATGTAGTGCCTGAAAGTGAAAGGAGGCTATATGAAAATAATA
SEQIDNO: 333
AAAATCCAAAACAAAGGGATAACAATATTAATTGCTTTATTTTTCTTCAAGGAATCACGTATCATCAATCTCTCTCTAGATGCTTAC
ACTCCCACTCAGAAGCTATTCTCTTCCTCCTATCGTGGACTGCTATAAATACCTTCCATTCCCTCCACCTTTCCCTTCAAGTCTTG
TTCAGCTTCCTTAATTAATTACCTTTTTGTTTGAGTATACTAGTCTTTCAACCATCATGGACTACAGAGTTGAGTCTTCAGAAACTC
TGAGGTACTTGACTCTCTCTCTCTCTCTCTCTCTCTCTCTCTCTCTCTCTCTCTCTCTCTCTCTCTCTCTCTCTCTCTCTCTCTCTC
TCCCCCCATCAGAATATCAATCTTCTATGCATCATGCATGATCCTAGTTGTTTAACTAATCACAATATATACATGTTTATGTGACTT
TTAATGATCAGGAACAAGTGTGCGGCATGCTACAGACAATTCAACAAAATCGAGCACTTAGTGGAGCACATGAGAACCTCATAT
CACTCAGCTCATGAACCCACATGTGGAATCTGTAAGAAACATTGCAGATCCTTTGAATCTCTCAGGGAACATCTTATAGGTAATC
AAACCAATTAATCAATTAATTCTACTCTTGCACGTACACACACACATATAAAATATATATTATATTCTTTAATACTTCCAGAATTCTT
TTAATTTCCAGTTAATAGTATGTATGTATTGGTTTTTGTTCAGGGCCATTGCCAAAACAAGAATGCAGGAATATATTCAGCACCAG
AGGATGCAAATTCTGCTTAGCTATCCTTGACAGCCCTTATGCTCTCAGGGTTCACCAGGACAGATGCCAACTCTCTGGTGTAAA
TGCTGTAATAATCCTAAATTAACACACCACCTTAATTATGAATTTTCTTTCTTTCTTTCTTTCTTTCAATGCAAATTAGCTCAATTCT
TAATATTATTCATACATGCAGGGCCTACTTGGTCGCTTTGCTAATTTGGGCATTCGTGACAATACTGAAAATGGTAGCACAAGAG
GCACCCAAGTTGTTGCACTTGCTTGCAAAATGGTTGGTGGGGGCAGTGACGGCTCCCTGGATCTCTGTGCAAAGGTCTGCCTC
ATCGACGAATACGAAAACATCATCTTCCAGTCTTATGTCAAGCCACTACTTCCAGTCACAAACTATAGGTAGCTATATTATATGGA
AAAGATGATATGTGTAGGTAGAGAGCTTCTTCTAGTATATACTAACTATAGTACAACATATATACTTGTGTATATGCATATAGGTA
TGAAACAACTGGCATTCGTCCTGAATACTTAAGGGATGCAATGCCTCTGAGGCAAGTGCAAAAGAAGATTCAAGACTTCCTCTG
CAATGGGGAACCAATGTGGAAGATTCGACCTAGAGGCGGAAAAGCTAGGATTCTTGTGGGCCATGGTTTGGATCATGATCTTG
ACTCTTTGCAGGTGGAATATCCACAAGTAATGATCAGGTAATTTTCATTTTCTTCTACCCTACCAAACTTAATTGCAAGATAAGCA
CAAAATTACTTGTGTTACTAATCATCCCATATGTTGTCTTAGTTCAATTCCCCATTATTTCCCCATTTTCCTTTGTTCAATCCAGCA
TATATAATTTTAGATCAAGCTCAAAACTTGAGAAACATCATATATGTAGAACTTTCCATTAGTAATTTCAAATGTATGTGACTATAT
GTAGGGATACTGCAAAATACCCTCCATTGATGAAAACAAGCAAGCTCAGCAACTCACTCAAGTATCTAACACAAGCATATCTTGG
GCAAGTACCTTATTATATCAATTTCGTCTATCTCAAATTCCAAATATAAACCTAGCTAGCTATGTGAGTACTAATGGAACTCCTAC
ATATTTACAGGTATGACATTCAAACTGGCATTCAAGACCCTTATGAGGATTGTGTTGCAACAATGAAGCTCTACATGAGAATGCG
ATCCCAAGTTCACAAGACAGAGGCTTACCCACTAGCTTCTGACCCACAGAACAGGAACAACTTTGCATCGTGGCGCCAAAATGA
GCTCGAGAGGATGAACCCAGAACAAATGCTGGAAGCCTCAAGGTCTGATTACTATTGTTGGTGTCTGGACTCCAGGGATATGTA
GTGCCTGAAAGTGAAAGGAGGCTATATGAAAATAATA
SEQIDNO: 334
MDFEPELPKTTNTRYKCAACYKQYKKKEHLVDHINVSFHSVHQPRCGVCKKHFKSFESQREHVTGPLAKENCKTVFSEQGCDLCLKI
FDSPNSLSAHKYMCRLSAPVPLVTMMERCEEFKHDINSSNEYHVGDGTEAIALDCEMVAGGSDGSLDLCARVCLIDEDETILFHTYVQ
PQYPVVNYRYEVTGLTEEHLRDGMPLQKVQDKVLQILYNGKTKLLVGHSVENDLDCLRMNYPDYLLRDTANYHPLMKTNLVSHPLKY
LTRTYLGYDIQSGFHDPYEDCVSAMRLYKRFCALDHQKEGNVASLAMLCAKDIPGSFDSWETDKLEKMTLDELYEMSRPNYKCWCL
DSVQAMQPQH
SEQIDNO: 335
ATTTATATTACTTTATTAGTGATTTTGATTCACTATCTAATATCTATGAAGAGAAATTACTCATAACATAATATTGATATAAAGATTC
GTATATATAAGAGTGATTTCTTGCCAAATATAATCAATTATGATAAGAAAAAAAATGACGGTCGCATAGAGAAATTAATGGTACAA
TTACTTGAAAAACCCTAATTCTCTGACTCTCTGTGAGAGAAGTCAGAAAAAATATCCCCCATTTGGGCTCACCTCCATTTTGTGC
ACATTTCTCGTACTGCTGTTTTCCCGCCAATTTTGAAGCCTCGTCGACGGCGTTGCTGAGAGCAGCTCTGGGCTCCATGGACTT
CGAACCAGAACTTCCAAAAACCACAAACACAAGGTACAAATGTGCTGCATGCTACAAGCAGTATAAGAAAAAGGAACATCTAGT
CGATCACATTAATGTCTCGTTCCATTCAGTTCATCAGCCTAGATGTGGAGTGTGTAAAAAGCACTTCAAATCTTTTGAATCACAG
AGGGAGCATGTCACCGGACCACTGGCAAAAGAAAATTGCAAGACGGTTTTCTCTGAACAAGGTTGTGATCTATGTTTGAAGATT
TTTGATAGCCCTAATTCTCTGAGCGCTCATAAATATATGTGTCGCCTATCTGCACCTGTTCCTCTGGTAACAATGATGGAGCGAT
GTGAAGAATTTAAACATGATATAAACTCCAGCAACGAATATCACGTTGGAGATGGTACGGAAGCAATTGCTCTGGATTGTGAAAT
GGTTGCTGGTGGAAGTGATGGATCACTGGACCTGTGTGCAAGGGTGTGCCTGATTGATGAAGACGAGACTATCCTCTTCCACA
CTTATGTGCAGCCCCAATATCCTGTCGTTAATTACAGATATGAAGTTACTGGGTTAACAGAAGAGCATCTCAGAGATGGCATGC
CACTCCAAAAAGTGCAAGATAAGGTTTTGCAAATTTTGTATAATGGAAAGACCAAGCTTCTTGTGGGGCATAGTGTAGAGAATGA
TTTGGATTGCTTGAGAATGAACTATCCTGATTACCTGCTGAGGGATACTGCAAACTACCATCCTCTGATGAAGACAAATCTGGTT
AGCCACCCGCTCAAGTACCTCACCAGAACATATCTAGGGTATGATATCCAGTCAGGTTTTCATGATCCATATGAAGATTGTGTGT
CTGCTATGAGACTCTACAAAAGGTTCTGTGCGCTAGATCATCAGAAAGAAGGCAATGTGGCTTCACTTGCTATGCTGTGTGCAA
AAGACATCCCTGGAAGTTTTGATTCTTGGGAAACCGACAAACTTGAGAAGATGACACTCGATGAGCTTTATGAAATGTCGAGAC
CAAACTACAAATGTTGGTGCCTGGATTCAGTGCAAGCAATGCAACCTCAGCATTAGATTCTCACTTGAAGTTAAGTCATTGCAAT
TTTCGTTCACATACCGCAGGATTGACAGAAACATCACATGTAGGAATATATGTAGGAATTACAAGTCTGAAGCTGTTGGAGATTC
TGAGCAAGGGTACCATCGCACATGTAGTAGGAAAATCTTTTTAGGGGGTCATGCCTTAATGTTATATAAGTTTGTTCATGCCTCC
TTTTTCGTCATCGGTCTCGGATGGTGAAATGATGCAAATTCTCTAAGGCCCTGTTTGGTTTGGGAGAGAGGATTTGCATTTGCAT
TTAGATTTCAAATCTATGGATATAATTTCATGACATGATTTTGCTGCTTGGGTTTTGGGGTAGATTTTATTTGTGTGATTCCCTAAA
GAGTACAGAGCTTCTGCTCTGGTGTGGCGTGGTGCACGTGATGAGATGCTTAAAGGTTCAGTGGGTGAGTTAGTAATTTATAAG
GTGGGTATACGTATATATTTCTCTAGAAGCAGAACTACTTTTTGTTTTATACGTATAAACCGAAAAAGGAGGGTTGGGCCTCTGT
CACTATTTACAGCCCAACTAGCCCATCTTCAGCTGTCAGATTAGCAACGACTTGTGGGCTTGTAGCATCCTAAGGTAATAGTAAT
ACCAAAGCAAATGTAAATTCTATTCCGAAAAAAGTTAACCCAAAAAGAAAAAAAATCAGAGGACTACTGTTCAAC
SEQIDNO: 336
TTTATATTACTTTATTAGTGATTTTGATTCACTATCTAATATCTATGAAGAGAAATTACTCATAACATAATATTGATATAAAGATTCG
TATATATAAGAGTGATTTCTTGCCAAATATAATCAATTATGATAAGAAAAAAAATGACGGTCGCATAGAGAAATTAATGGTACAAT
TACTTGAAAAACCCTAATTCTCTGACTCTCTGTGAGAGAAGTCAGAAAAAATATCCCCCATTTGGGCTCACCTCCATTTTGTGCA
CATTTCTCGTACTGCTGTTTTCCCGCCAATTTTGAAGCCTCGTCGACGGCGTTGCTGAGAGCAGCTCTGGGCTCCATGGACTTC
GAACCAGAACTTCCAAAAACCACAAACACAAGGTTCCATCTCTCTCTCTCTCTCTCTCTCTCTCTCACATCTTCTGCAATTTGTGA
GGTTTATGGCTTTTATTTCCACATTTCCACAAGGACTTGCATGCTTGCTGAGAAATTGAATACAGATTTTGTTTGGGTGGCTTATT
TATGAACTTTTCTGATAAGCTAATTGAGGTGCATTGCAGAATTTGACATGGTTTATCACGCATTGTTTGATTCTAGTTTTTTCGAA
GTGTATTTCTTGATTTGGAAATAAATTTCCTTTGATTTTGGAAACAAATCCTTCCTTGGGGATCATTTCACTTAATTAATCCCAATT
GTCCTGCTATAGTAATGTATCTAAACTTGAATATTTAAGAACAATTGCAAAACTAGTTGACAAACTGTGCTATTAGGTATATACAC
AATGTGATATGTGATTTTTTTGTTGTTGAATATTTTGAAAAGATTCTTGACCTGTGGGCTTTGCAGGTACAAATGTGCTGCATGCT
ACAAGCAGTATAAGAAAAAGGAACATCTAGTCGATCACATTAATGTCTCGTTCCATTCAGTTCATCAGCCTAGATGTGGAGTGTG
TAAAAAGCACTTCAAATCTTTTGAATCACAGAGGGAGCATGTCACCGGTGAGATGTAATTCCGAGTTGCATTGTAATTGATCAGA
TCATTGCATAGTCGTTTTGATTCATCTATAAGATTGCTTGCTGTTTGATATCCTTTCTCTGGTTGCTATGATTTAGGACCACTGGC
AAAAGAAAATTGCAAGACGGTTTTCTCTGAACAAGGTTGTGATCTATGTTTGAAGATTTTTGATAGCCCTAATTCTCTGAGCGCT
CATAAATATATGTGTCGCCTATCTGCACCTGTTCCTCTGGTAAGTTGATTAGTTGAACATCAAGCGTCCTGTATGGAATTGGGAA
ACTTGTCAGCTTCCAGTATTCTGAATCTTTTACCCTTTTTACCCATTAAAGATACTCTTAGCAGCAACCGCATATAAGATATGCAC
ATACATTACTTATATTTTCAGTCAAAGTGTTGCAGGTAACAATGATGGAGCGATGTGAAGAATTTAAACATGATATAAACTCCAGC
AACGAATATCACGTTGGAGATGGTACGGAAGCAATTGCTCTGGATTGTGAAATGGTTGCTGGTGGAAGTGATGGATCACTGGA
CCTGTGTGCAAGGGTGTGCCTGATTGATGAAGACGAGACTATCCTCTTCCACACTTATGTGCAGCCCCAATATCCTGTCGTTAA
TTACAGGTACTAGTGTGTTATGTTTCTCATCTTTGATTTCTTACAAGAATTTTGCGAATAGGCCTCTGATTATTCCCACGTGTTGA
CAATGTTTCCATTCCAGATATGAAGTTACTGGGTTAACAGAAGAGCATCTCAGAGATGGCATGCCACTCCAAAAAGTGCAAGAT
AAGGTTTTGCAAATTTTGTATAATGGAAAGACCAAGCTTCTTGTGGGGCATAGTGTAGAGAATGATTTGGATTGCTTGAGAATGA
ACTATCCTGATTACCTGCTGAGGTATAAGAGTTTCTGTTTTCTTCTGTAATCCTCTTCTTGAGATATGTGAATCACGAGCACAGTG
TTTCTATAGTTTTTCTAGATCTGATTGAACTATCATGTCATGCTATGTTCTGGTTCTCATATGCACTTGTATTCTTCTCTTCAGTCC
CTTTCTTTATTATATAGGCCATAGTGTTTGGGCTGCTTTGTGTAGATGTAAGATAGACGGTGTCACTGTTTCTTGGACAATTGCGT
TTATGGCTGTACTTCCTTTCATTCAGGCCAGTCAAGATTATGGCCTTAGTCATGATGAAATTTTGCATAAAGGACCAGCTTATATG
GCATCTATTTAACATAGATTGAGCAAAGAAGCCTGTTCTCTGTTGCCTCTTAGATGCTTGATGGTTACTTATTTTATATGCAGGGA
TACTGCAAACTACCATCCTCTGATGAAGACAAATCTGGTTAGCCACCCGCTCAAGTACCTCACCAGAACATATCTAGGGCAAGT
TATTCTTCTTCTCAGATTTTTACTTTTTTAGTCTCTATGTTATTTGCTTGTAGAAGCAGGCTCTAGTTTTAATTGCTCCATTGAATAT
TTAGTGTCATGAGGCTTTGGTTTTACAGGTATGATATCCAGTCAGGTTTTCATGATCCATATGAAGATTGTGTGTCTGCTATGAG
ACTCTACAAAAGGTTCTGTGCGCTAGATCATCAGAAAGAAGGCAATGTGGCTTCACTTGCTATGCTGTGTGCAAAAGACATCCC
TGGAAGTTTTGATTCTTGGGAAACCGACAAACTTGAGAAGATGACACTCGATGAGCTTTATGAAATGTCGAGACCAAACTACAAA
TGTTGGTGCCTGGATTCAGTGCAAGCAATGCAACCTCAGCATTAGATTCTCACTTGAAGTTAAGTCATTGCAATTTTCGTTCACA
TACCGCAGGATTGACAGAAACATCACATGTAGGAATATATGTAGGAATTACAAGTCTGAAGCTGTTGGAGATTCTGAGCAAGGG
TACCATCGCACATGTAGTAGGAAAATCTTTTTAGGGGGTCATGCCTTAATGTTATATAAGTTTGTTCATGCCTCCTTTTTCGTCAT
CGGTCTCGGATGGTGAAATGATGCAAATTCTCTAAGGCCCTGTTTGGTTTGGGAGAGAGGATTTGCATTTGCATTTAGATTTCAA
ATCTATGGATATAATTTCATGACATGATTTTGCTGCTTGGGTTTTGGGGTAGATTTTATTTGTGTGATTCCCTAAAGAGTACAGAG
CTTCTGCTCTGGTGTGGCGTGGTGCACGTGATGAGATGCTTAAAGGTTCAGTGGGTGAGTTAGTAATTTATAAGGTGGGTATAC
GTATATATTTCTCTAGAAGCAGAACTACTTTTTGTTTTATACGTATAAACCGAAAAAGGAGGGTTGGGCCTCTGTCACTATTTACA
GCCCAACTAGCCCATCTTCAGCTGTCAGATTAGCAACGACTTGTGGGCTTGTAGCATCCTAAGGTAATAGTAATACCAAAGCAA
ATGTAAATTCTATTCCGAAAAAAGTTAACCCAAAAAGAAAAAAAATCAGAGGACTACTGTTCAAC
SEQIDNO: 337
MRTSYHSVHEPTCGICKKHCRSFESLREHLIGPLPKVECARIFSVRGCNLCLDILGSPNALRAHRGTCQLSRGNTGALLSRMANLGIQ
DDLNSRTRGSKVVALGCKMVGGGTDGSLDLCARVCLIDEYENIIFHTYVKPQIPVTNYRYETTGTRPEFLRDAMPVKQVQRKIQDFLC
NGEPIWKIRSRGGKARILVGHGLDHDLDCLQMEYPTLMIRDTAKYPPLMKTSKLSNSLKYLTQAYLGYDIQTGIQDPYEDCVATMRLY
MRMRSQSHKIEDYPLASDPQNRNNFASGRQSELERMTPDEMLEISRSDYYCWCLDTKEGS
SEQIDNO: 338
GAAGTTTCTCTATGATTAATCATCACGGCCAGGAACAAGTGTGCAGCTTGCTACAGACAATTCAACAGGTTGGAGCACCTGGTT
GATCACATGAGGACCTCGTATCACTCGGTTCATGAGCCAACCTGTGGAATTTGTAAGAAACACTGCAGATCTTTTGAATCTCTCA
GGGAGCATCTCATAGGGCCGTTGCCAAAAGTGGAATGCGCAAGAATATTCAGTGTCCGCGGATGCAACCTCTGCTTAGATATC
CTTGGCAGCCCTAATGCACTTAGGGCTCATCGAGGGACATGCCAACTTTCACGCGGAAACACCGGAGCGCTGCTTTCTCGCAT
GGCTAACCTAGGTATTCAGGATGACCTGAATAGCAGAACAAGAGGCTCAAAGGTGGTTGCACTGGGCTGCAAAATGGTAGGGG
GTGGAACCGATGGCTCGCTGGATCTTTGCGCAAGGGTTTGCCTCATCGATGAATATGAAAACATCATCTTTCATACTTATGTCAA
GCCCCAAATTCCAGTCACAAACTACAGGTATGAAACCACAGGGACAAGGCCCGAATTCTTGAGGGATGCAATGCCAGTGAAGC
AAGTCCAAAGAAAAATCCAAGACTTCCTTTGCAATGGAGAGCCCATATGGAAGATTCGTTCTAGAGGTGGAAAAGCTAGGATTC
TCGTGGGTCATGGTTTGGATCATGACCTGGACTGTCTACAAATGGAGTACCCAACGCTAATGATCAGGGACACAGCTAAGTATC
CTCCATTGATGAAAACAAGCAAGCTCAGCAACTCACTGAAGTATCTGACACAAGCATACCTCGGGTATGACATCCAAACTGGCA
TACAAGATCCTTATGAGGATTGTGTTGCAACAATGAGGCTTTACATGAGAATGAGATCCCAAAGTCATAAAATAGAGGACTACCC
GCTCGCGTCTGACCCGCAGAACCGAAACAACTTTGCATCAGGGAGGCAAAGTGAGCTAGAGAGGATGACCCCAGATGAAATGT
TGGAAATCTCCAGGTCTGATTACTATTGTTGGTGCCTGGACACGAAGGAAGGCTCCTGA
SEQIDNO: 339
GAAGTTTCTCTATGATTAATCATCACGGCCAGGAACAAGTGTGCAGCTTGCTACAGACAATTCAACAGGTTGGAGCACCTGGTT
GATCACATGAGGACCTCGTATCACTCGGTTCATGAGCCAACCTGTGGAATTTGTAAGAAACACTGCAGATCTTTTGAATCTCTCA
GGGAGCATCTCATAGGTAAAATCCAAGACAACTACATGAAACCCGAACCATATTGCCCTTATGAAGATATATCATTCAAAGGAAG
TACTTCTTGTCTTGGGCAGGGCCGTTGCCAAAAGTGGAATGCGCAAGAATATTCAGTGTCCGCGGATGCAACCTCTGCTTAGAT
ATCCTTGGCAGCCCTAATGCACTTAGGGCTCATCGAGGGACATGCCAACTTTCACGCGGAAACACCGTATAAATCTTCAGCTTG
CATGACAATACAATTTGAAGTTCTAATGACTTTGTCTAGTTTCAAGCATGTCACATGTTACTGCCCTTTTCTTTTCCAGGGAGCGC
TGCTTTCTCGCATGGCTAACCTAGGTATTCAGGATGACCTGAATAGCAGAACAAGAGGCTCAAAGGTGGTTGCACTGGGCTGC
AAAATGGTAGGGGGTGGAACCGATGGCTCGCTGGATCTTTGCGCAAGGGTTTGCCTCATCGATGAATATGAAAACATCATCTTT
CATACTTATGTCAAGCCCCAAATTCCAGTCACAAACTACAGGTTTGATGAGTCTCTTTAAAGCTAACTGTATTTCCACCCTGGCT
GAATTTCAATTCTAAATATAAATTCTTGAAAACATTGTAGGTATGAAACCACAGGGACAAGGCCCGAATTCTTGAGGGATGCAAT
GCCAGTGAAGCAAGTCCAAAGAAAAATCCAAGACTTCCTTTGCAATGGAGAGCCCATATGGAAGATTCGTTCTAGAGGTGGAAA
AGCTAGGATTCTCGTGGGTCATGGTTTGGATCATGACCTGGACTGTCTACAAATGGAGTACCCAACGCTAATGATCAGGTAAAA
AGCCCTTCAAATTAAGAAAATCAAAATTGCACCATAGCTTTGAAACTATAACAGTGGGTCTCAAACTAGAATCAACCAGCATCATT
CATAATTCCATCATGGCTATTATACTCATGTAACAGAAAATCAAGGTATTTTCTGAACAGGTGATTGGTGTCCAGTTCTCTATTCT
CAACAAAAACTCTTAAGGGTGGAGCCTCAAAAAAATAAATAAATAAATAAAAACAATTGCAAAATCAGATGTAATATAATACTGAA
TTAATCTGAAATGCATATTGGATCAGGGACACAGCTAAGTATCCTCCATTGATGAAAACAAGCAAGCTCAGCAACTCACTGAAGT
ATCTGACACAAGCATACCTCGGGTAAGTACATCACATGCATTTCAATTTCGAGTTCACTGCCAAAATTTAAATATATATTTCAGGA
AAGGAATGAAACTTCTGGTTTCCAGGTATGACATCCAAACTGGCATACAAGATCCTTATGAGGATTGTGTTGCAACAATGAGGCT
TTACATGAGAATGAGATCCCAAAGTCATAAAATAGAGGACTACCCGCTCGCGTCTGACCCGCAGAACCGAAACAACTTTGCATC
AGGGAGGCAAAGTGAGCTAGAGAGGATGACCCCAGATGAAATGTTGGAAATCTCCAGGTCTGATTACTATTGTTGGTGCCTGG
ACACGAAGGAAGGCTCCTGA
SEQIDNO: 340
MGSEAVPSESRTTRYKCLACFRQYKKKEHLVEHMRVSYHSVHQPKCGVCQKQFKSFQSLREHLTGNLPKKNCLKIFSEQGCNYCLK
IFKNADSLSEHKEMCQLPVPVTIEKIRMPSTESQIDFSDSINRDHTSRGLEAIAIDCEKVGGGSDGSLDLCARVCLIDEDENIIFHTYVQP
QIPVTNYRYELTGITEAHLRDAMPLKEVREKVMEVLRNGESIGRLRLDGGKGRLLVGHDLRHDLDCLRMHYPDHLLRDTAKYLPLMK
TNLVSFSLKSLTQKYLGYDIQSGMHDPYEDCVSVMRLYKRMQSQDHSDEGIGTAIHYRLRVMIFGHNRTDTGGSMRT
SEQIDNO: 341
CTGATTTTGTTTTTTTTTGGGTTCGGGTTGTTAGTGAGGTTTCCAGAGAATCCATGGGCTCGGAGGCAGTTCCTTCGGAATCTAG
AACTACAAGGTACAAATGTTTGGCCTGCTTCAGGCAATATAAGAAGAAGGAGCATCTAGTTGAGCACATGAGGGTATCATATCA
TTCTGTGCATCAGCCAAAATGTGGGGTCTGCCAGAAGCAGTTCAAATCTTTCCAGTCACTAAGGGAACACCTTACTGGTAATTT
GCCCAAGAAAAATTGTTTGAAGATATTCTCTGAGCAAGGTTGCAACTACTGTTTGAAAATCTTCAAGAATGCTGATTCTCTCAGT
GAGCATAAAGAAATGTGTCAATTACCTGTGCCTGTTACAATAGAAAAAATCAGGATGCCATCTACAGAATCTCAAATTGATTTTTC
AGATTCTATTAATAGAGACCACACTAGCAGAGGTCTTGAAGCAATTGCCATTGACTGTGAAAAGGTTGGTGGCGGAAGTGATGG
ATCGCTTGACCTTTGTGCTAGGGTATGCCTCATAGATGAAGATGAGAATATAATTTTTCACACTTATGTGCAGCCACAAATTCCT
GTCACCAATTACAGATATGAGTTAACTGGGATTACTGAAGCACATCTGAGAGATGCCATGCCACTAAAGGAAGTGCGGGAAAAA
GTTATGGAAGTTTTACGAAATGGAGAATCCATTGGGCGACTGCGTTTGGATGGTGGGAAGGGCAGACTTCTTGTGGGTCATGA
CCTACGCCATGACCTGGATTGCTTGAGAATGCACTATCCTGATCACTTGCTGAGGGATACTGCAAAATACCTCCCCTTGATGAA
AACAAATTTAGTCAGCTTCTCCCTGAAGTCGCTCACTCAAAAATATCTTGGGTACGATATCCAGTCAGGGATGCATGATCCATAT
GAAGATTGTGTATCTGTAATGAGGCTGTACAAGAGAATGCAATCTCAAGATCACTCAGACGAAGGAATTGGAACAGCCATTCAT
TACAGGCTGAGAGTAATGATCTTTGGGCACAATAGAACTGATACAGGGGGTTCGATGAGAACATGACAGGAAAAGAAGCGAAT
ATCTCCGGTGAGTCTACAACATTGTAGCCATGAAATGAATGTGCTACAATGTTGAAGATATTTCGTCGAATATGAGATCATTATG
AGAACATTTCCTGATATAGCAAACTCAATATTGATAGGGCTTCTTCAATACCCAACCCTGTTTTCCTATGCAAACATTAAACAGAT
CTTGTGCTTGTGTGTGTGTGTGTGTGGGTTTGATTGTTTTGTTGGAGTTGCCTTTTTATTATTTTTTATTTTTTAAATATTTTTATTT
TGCAAATACTTTCCCATGTAGTGAAGAATGAGGAAGAGATCTTATATAATTTCGCATGTAAGGGGTTA
SEQIDNO: 342
CTGATTTTGTTTTTTTTTGGGTTCGGGTTGTTAGTGAGGTTTCCAGAGAATCCATGGGCTCGGAGGCAGTTCCTTCGGAATCTAG
AACTACAAGGTTTGTTTTTCTGTTTTTTTTTTTTAATCGATATTCAGTGGTGGGTTTATTTGGATGATGAGAGAATGCAAGGAAAAA
GAGAGAAATGACGGTTTTGAAGGAAATGCTATTGCCATTCTTGGTTTTACCGCTTCCACGGACCTCAACGTGCGAGTGTGGAAT
TGGGTTCTCTGCATTTGCCGTGGAAGCAACGGGCGAATTTGGCAATAGCATTTCCGGTTTTCGTTTGAACTTGAAGACCCACTT
CAGTGAGCATCGTCCATTAAAATCAGTGGTTACGACGATTATCTTAGAATTTGGATGCTTTTAGGTTTATTAGTTTCACGCTTAGT
TCTCTTTCCTTTTGGTTTGATTCACTTCTGCTCTGCCCTTTCGTTTAATTTACCAACTGAAGATTTGATAAGAAGGGAATTATTTGA
ATTTGATTTGATTAAATTATCGTTTTTGATCTGAAAATTGGCATTTTAACCTATAGTTGGTCATTAGATTCTATTGACCATGTAGGG
CTGATTGGACTTGATTAAATTATTGCTTTTGACCTGTAATTGTTGTTTTTGATCGGCAATTGACTATTAGCCTCTTTTGATCAATAG
GGGCGATATGATTTTAGCTTATTTGGAATTCCAGTGGTCGGTCCATGTTGCACTATATGCTTGAATTCAGTTTGTTTATTTTCCTG
TTGTCTGAATTTATTTTCCTTGTTGAATATTCTTAAATTCAGATTATTCCTTGAGTTGTTAGTAACTTAGTGTGTATAGGTGAATAAT
GGTCCGTGCTAGTGCTCCAATGGTAAAAGTAGTTTTACTTCTTTTAGCGTGTTGGTCAAGGTTCTTAATAATTGGTATCAGAGCT
AGAATCCACCTCCCAAATTTAGGTCATGGAAATGGCTACAATTTATTTATGCTATACCTAGGAATGTGTTTGATTTGACTGGTTCC
ATAACTCCTCAGTTTTTCCCATGACTAGTTTTATTTTAATAATTTCCCCATTATCATTATTCCAATCACAAAGCAGTGAATTAAGAG
CTACAACAATAATTACAACTTAAACGAAACAAGTCCATGTTTCCGAGGCAAAACAAAAAGGTTGCTTTGTATGTTTCTATATTAAC
ACATTGGGCTATTCTAGAAGAAACCTCTTGAAGGCAAAAGTGAAGGGAACTTGAAGAGGGGGATAAAAGTATTAAGTTCTTCCA
CAAGATGAAAAATGCTCATAAAAGATGTAATCTCATTGGGAGGTTGAAGGTTAATGGGGCTTGGCTAATAGAGGATAAAGAGAG
TTCACCAGGAGTGATGAAGGAGTTCCATCTTTTATTGACTAATCCAAGGGATTGAAGACCTAGCATTGGTGTGTTGTCTTTTAAG
ACTTTGTGCAAAGACAACTCTCTAGCTGTGGAAGAGCCTTTTTTGAGGACTTTTGTGCTGCATTGTTAGGGATGGGAGAAGATA
AAGCCCTTGGTTCAAATGGTCTCTCGATGACATTTTGACAATATTATTAGAACTTTGTTAAAGGTTAAGTGTTAGGGCTATTCGTG
GAGTTCTTTGGGAAGGGGATGTTTGAGAAAAGTTCAAATGCTACTTTTTGGTGTTGGTTCTGAGAGACAAAAGAGTTGAAGGAC
TTCAGACCAAGAAGCCTAGTGGAGGGATTGTACAAGCTTCTTACCAAGGTTTTAGCTAATATGCTTAAGAAACCGGCATTTGCTT
CGTAAAATGCTTTTGTGGAGTGTAGGCATATTTTAGATGTGGCTCTCATGGCTAATGAAGCCATTGACTCAAGGAGGAAGAACT
CTAGTGGTGGTTAGTTTGTAAGTTAGATATTGAAAAAGCCTATTACTTGGTGAACTAGAGCTTTCTTTTGAACTACTAGGTAAAAT
TGGATTTAAGCAGAAGTAGGTTGAATGCATTCAGTTTTCTATCTCAACAAGGTTCTCTATGATGGTGAACAACACACTTTTCAGCT
TTTTTTGAGCTCAAGGAGCTTGAGTTAGGGTGACATCCTCTCTCCTTATTTGTTTGTAATGGTAATAGAACTCTTAGTGTTCTTTT
GTGTTAAGGGAGGGCGATTTTATTTCAAGCTCAAGGTAGGAGGTAGGGAATAAGAGAGTGTAGAGGTTTCCCACCTCCAATTTG
TTGATACTTTCCTTTGTGAGCCCTGTTTGGAACAGTTGACCTGCTTGAGTTGGATTCTGACTTGGCTTGAGATTTCCTCTAATAAA
AAATTTAACTTGGAGAAAGGTGAATTAATTCTTCTGAAAAATATGGAGACTCCAGCATCCTTGCTGTGTTATGGGGTTGGGAAGT
TGCCTACCAAGCATATTTAGGTCTACTTTTGTTGAGCCCCATTTATGTCATCAATGATTTGGGATGTAGTAGGGGAAAATTTTCAT
TAAAAGTTGTCAAGGTGGAAGCAAAAATAGCTCTTAGAGGGTAGGAGAAAAAAAGTTAAGTTCTAATAAGATGTTTGTTGTCATG
ACTCTCCTTTAAAGTGGCTTTCCTTTCTCTATATTCTTTTAGCGTTTCTAAGTCGCCGAGTTCCCGAATAGCAATATATGGGTGGA
TAGAGTTCCAACCAAAATTGCATTTTTTTGCATGGGAAGCCGCTTGGGGGAAGGTTCTCACTCTTGATAGGCTTCAGAGAAGAG
GGTGGCAGTTCCCTAACTGCTGTGTCTTGTGTGGTTGTGAAGAGGAAACGATAAATCATATTTTAATTCATTGTACAGTTGTCAG
AGTTTTGTGGGATATCATTCTTGGGTTGTTTGGTGTTTAGTGGGCCTTTCCAGAATCTGTAAAAGAGGTTTTATTTAGCTGGAAG
GGCTCTTTTGTGGGAAAAAAGAGGAAAAAACTGTGGAAGTCCATCCCGCTGTACATTTTTCAGACAATTTGGAAGGAGAGGAAT
AGACTATCTTTTAGGGAGAGGGGGGGGATGTTAGCAGTTCAAAAGTTAAAAACTTCATTTGTGTGTAATGTTTGGGGTTGGGCT
AAATTGTACATTGGTGTGGAGTTGATCTCCCTTATAGGCTTCTTGGAGTGTCTAGCCTCCACTTAGGGGTTGGGGTGTTTTGTTC
TGTTTTTGGTTGGGAGGCCTTAGTCGCCTCGTATACTTCCTGTATGCTTTGCGGCTATTTTGCCTCCTGATAATATATTCTGCGC
TTACTTATAAAAAAAAAAGGATACTTAAGTGGTCAATGTTTATAAGGCTTCTAGTGGGCAGGGCCATGGAACCTATGTTTCTTAA
GGCAGTTCCAAGATTATGAGGAAAGATTGGTTTGAAACAGTACCAAAGATGGGAAGTCCTCTATTAGATCCTTCTATTTTGCTTT
GGAGTTGAATGATAGAGAGGCTTTCCCTTTAAAGGAGGTCTAAAGCCCTTGGGTCCCCTTGAAGGTGAGCATTTTTGCTCTGGA
AAGGATTCTAACCTTAGATCTTCCTAAAAAAAAAGGTGACTTTCAAATTGTATTTGCATTTATAATAGAGAATTAAAATTGGCTAAT
CATACCCTCGTCTAATGTGGAATATTAAGAGGATTGTATCTTTTGTTTGATCTCTTTGACATCTCTTAGATTCTCACCAATTCAATG
GGAGAGATTTTGTAGGGCAAGCATGGAAGTTTTGTGGGGAAGAAGAAGAAACCAATGTTTTCGAACTTAGATTGGATTGATTGG
TCAGACCAATTCAACCTTTAATCAGACCACTTTTTGGTTCAAGTAAGATAATTGGCTCGTTTTTCTATTAAAATGGCATTGGACTG
GCCAACGGTCAAACAGCCAAACTGGACAGACTGACCATTTTTCTTTTGGCCCAAAAGGTTATTGGGCTGAAATAATTTTGGGTA
GGTGTCCTCTCTGGGTTACTCTCCAACCAGCTTGACATCCTTACATGATTTACAAACCTTTTAAAGACCCCATCAGTTTTATTTAT
TTATGATATGGGATAGCTCAGAGATGTGGGATGAAATAAAGCTATTGTGGTGGAGAGGGTTTGAGCCTTGGACTTTGGGGAATG
AAACCCAAGGGATGACCACTTGCCTACTGATCCATTTGTTAAATAGTGCTACGAAAATATCTAAATTAATGTTGGTTTTTTCAAAT
TTCCATTACTTAAAACCCTAAAATAAGCATAAATATTTAACTTTGCATTTATTGTTATAATGATAAATATGAAAATGATTTAAGTTAA
ACCATGTGATAATTTTAAAATTTTGAATGCGAGAAAGAAAAGAGTGTCTTCTTCATCAAGGAAAGAGTACAAAGCATATGTATATG
GACTTTTACGAACTAAACCACCCTTATCTAATAACTATTAATCATTTTTTAAAATAAAATTATCGAAATAATAGGATATACAACTTTT
GACATGTAGATAAAATTAAATAATAGAGTTTTCCTTCCATCTTAAATATGTTTTTACGCTGAAATATTATACATATTTTATTAAATAA
AATTAAAAATATAAATGCATTTATATTTATCATTATCATATTTATCAAGATTAAAAAAAATGAAATATTATTAAGGTTTTAATTATTTA
TATATATTCTTAATTTTTTATAATTATTTTAATTTTAATAACATATAAATGATATATTTATAAAGATATGTTCACATCACGGTTTGATC
ATAGTTGAACCACTAGTTCGACTAGTAAATCATGACCTAATAACTTTTCCGGTTCAATGATCAGATCTGAAAACATTGAAGGAAAC
TTTAGAAAACAACCCCTCTATGTTTGTTTTGGACCATTTGAGAGGAACCTGATCATAGATCCTTTGATGGTGTAGAACAATCAGA
TCAGTCACCTTAAGCACTCTTTTCATTTGTGGTTTCCTCCAAGGGTCTCATCAACATCTTTTTAATGTTTCTCCTTCCTTGTTGGA
CTTCATTGATTGGTTAGGGTCTAGATAGCGCTTTGTGGGGATTGTTTGTTTTTGTTGTTTTGCCCCTTTGGCACCCTTCATATAAG
CTCCCCTGTGTACTTGGGATGTGCCATGCTTTTTATTGATACGATATTCATTTGCCTACCACCCCACCAAAAAAAAAAAAAAAAAA
CCGCACACATGACTTTGCTTGGCATGTTTGATGTGTATCCCTTTTTTCTTTCCTTTTTCAGGTACAAATGTTTGGCCTGCTTCAGG
CAATATAAGAAGAAGGAGCATCTAGTTGAGCACATGAGGGTATCATATCATTCTGTGCATCAGCCAAAATGTGGGGTCTGCCAG
AAGCAGTTCAAATCTTTCCAGTCACTAAGGGAACACCTTACTGGTGAGATACTGCCATGCATTCATTTCTGCACTGTTTATCAGT
AAAACTGCGTTTTTCATTACCTTTCACAATTGTTTAGGTAATTTGCCCAAGAAAAATTGTTTGAAGATATTCTCTGAGCAAGGTTG
CAACTACTGTTTGAAAATCTTCAAGAATGCTGATTCTCTCAGTGAGCATAAAGAAATGTGTCAATTACCTGTGCCTGTTACAATAG
TAAGCTACTCAGTACAATCTTCAAGTACCCCATACATATATAGAGAAATATATCTTCCTGCAAGTTTGTAATGTGGCATGTGATCG
ATTGCAGAAATTCATTTTAAAATCGATATTTTATACAGAATCTCAGATTGATTTCTAAATCTGTATCAAACTCTCTCAGGAAAAAAT
CAGGATGCCATCTACAGAATCTCAAATTGATTTTTCAGATTCTATTAATAGAGACCACACTAGCAGAGGTCTTGAAGCAATTGCC
ATTGACTGTGAAAAGGTTGGTGGCGGAAGTGATGGATCGCTTGACCTTTGTGCTAGGGTATGCCTCATAGATGAAGATGAGAAT
ATAATTTTTCACACTTATGTGCAGCCACAAATTCCTGTCACCAATTACAGGTATTTGTGTGCTCTTTATTATGTTGGGTTTCTCTGA
GATACTGTGGAGAATTGGTTCACTGATCATTCAAATATCCCTGCAAATATTTTCAGATATGAGTTAACTGGGATTACTGAAGCAC
ATCTGAGAGATGCCATGCCACTAAAGGAAGTGCGGGAAAAAGTTATGGAAGTTTTACGAAATGGAGAATCCATTGGGCGACTG
CGTTTGGATGGTGGGAAGGGCAGACTTCTTGTGGGTCATGACCTACGCCATGACCTGGATTGCTTGAGAATGCACTATCCTGAT
CACTTGCTGAGGTGAACTACTTTGGACTTGGCTAATTGAGTAAAGCTGTTCAAATGATATTTTATTTCATTTTGAGAAAAGCTCAT
GATTAAAGCGATGGTTTATCATCTAAAGTCGTACATTTATCTAATGAGTTTATCCATATGATATTTTCCCCCTTCTTACCTCACTTT
TAGATATATCTTGGGAAGTTACTTGTTTCTGTAGTACTGTGTGAAAGTATGACATGTAGTCCATCTAAAACAGTATGGAATAATTT
CCCATTTTAAGGAACAGCTCAACCCTTACTAAATGGTACATGATTGGAGGAATACAAAGGAAGTCATAAGAAAATGATATTATCC
CTGTTCCTCATCCATACCAGGCTAGCAAATGTGAATGCGATTCTGCTGGGTCTTGGTTGAAAACAGATCTCTGGTAAGCGAAAT
TGTATCTTTAGTTTTTCCTTCTAGTCCCCTCCTCATCAACATTATTCCATGATCTCTGGATAGTCAAAAGTATTAGGAAAATCCCTA
GCATCACTATTTCTTGATGAGCTTTTTTCAGGCAGTTGTTTCGAGATAGTTTTTGTTTTTCTTTCCAAGCCCCTGAAAATCAAAGA
ATTGTTGCCTCAATTATGGAAGAAGGTTTGGAAGAATATGTGATTTAATAATAACACCATGGAACTTAGGTTTAAAAGCATTTGCC
AAAGATAAAAGTTGCTGAAGTAATTGGCATGCTCAAAGTAAACTTCATTTGCTTGGCTGCAGCACTTTAGGTTCTGTCTTGGATA
TGCGTCTCCCCTGATGGTTTGATGTGGCAATATTTTCAAAGCATAATCTTTGTTTCAGAAAAATACATCCAACTCTTTTTGTGTTAT
GGTTTGTTTCCTCTTCACATAGGGATACTGCAAAATACCTCCCCTTGATGAAAACAAATTTAGTCAGCTTCTCCCTGAAGTCGCT
CACTCAAAAATATCTTGGGTAAGTTATTGCTCAGGTGCTCTTGAAATTTATTTTCTATTTTACTTTGATTTAGTGTTTCTGAAGTTG
CTTGGTCAGACTATACACTGCATCCATATTGTAGTTTTAACATTTTTCTTTGCTTTTAAAGTAAAACTCAAATCAGGATAGCCACAA
GTTTTGTCCACATTTAGAAACCGGTTGTTAAATGTAAAGAGAATGCCGCAAATTTAATTCATTTTCCCAATATGACTTTTGGAAGG
CAACTTGTAAGTTTTATTCTGTTTCAGTTTGGGATTGTTGTAAGCTTTTTCTGTTTTTCTATCATGTTAATGTAGAAAACGAAGAAG
AGGGGGGACATGGGGTGGTGGTGGATGTTCATTATCATTGTACATATCAAATATTTGGGTATTTATTTATGAAGTTGTAGGGTTC
TCCATCACGCTGCCGGTTGAAAAATAAAAATCTATCTGCGATCCTCATGATAAATACAATTTGTTTGCTTACAGCACTAGCTCAGT
TTTTAAATGTTTACAGGTACGATATCCAGTCAGGGATGCATGATCCATATGAAGATTGTGTATCTGTAATGAGGCTGTACAAGAG
AATGCAATCTCAAGATCACTCAGACGAAGGAATTGGAACAGCCATTGTTAATCACCATACCCAAAGTTTTGGCAGTGGTTTTGAT
TCCTGGAAACTTAGGGAGCTCAAGAATATGACCCCAGATGAGCTTTATAAGCTCTCAAGACCAAACTACAGGTGTTGGTGTTTG
GACTCAAGACAAGCATTACAGGCTGAGAGTAATGATCTTTGGGCACAATAGTGAGTAGATTTCTTTACCTACATTTCAACAAGTT
ATAGTTACCTAACTATGAATGGAAATCATTTAGGTATTTTTTTTCTTAAGATTCATTGATAGACAATTGAACTCTTCCAACATTTTAC
AAAACATACCATTCTTCAAAATTTAGGACCAAAGCTGTTTTACACTGACATGTTTCTATGGCTGAGTTTTTGTTGCACTTTCTTTGC
AGGAACTGATACAGGGGGTTCGATGAGAACATGACAGGAAAAGAAGCGAATATCTCCGGTGAGTCTACAACATTGTAGCCATG
AAATGAATGTGCTACAATGTTGAAGATATTTCGTCGAATATGAGATCATTATGAGAACATTTCCTGATATAGCAAACTCAATATTG
ATAGGGCTTCTTCAATACCCAACCCTGTTTTCCTATGCAAACATTAAACAGATCTTGTGCTTGTGTGTGTGTGTGTGTGGGTTTG
ATTGTTTTGTTGGAGTTGCCTTTTTATTATTTTTTATTTTTTAAATATTTTTATTTTGCAAATACTTTCCCATGTAGTGAAGAATGAG
GAAGAGATCTTATATAATTTCGCATGTAAGGGGTTA
SEQIDNO: 343
MDSRNESSETLRNKCAACFRQFNRMEHLVEHMRISYHSVHEPMCGICKKHCRSFESLREHLIGPLPKQECKNIFSIRGCKFCLNIFDS
YSSRMIHQERCQLSNLSTGLIARMSSLGLRDHLMIDNGYAVGNQVVALACKMVGGGSDGSLDLCGRVCLIDENENIIFHTYVKPPIPV
TNYRYESTGIRPEYLRDAMPLKMVQSKIQNFLCNGEPMWKIRPRGGKARILVGHGLDHDLDRLQLEYPAVMIRDTAKYPPLMKTSKL
SNSLKYLTQAYLGYDIQTGIQDPYEDCVATMRLYMRMRYQRHAVEAYPFASDPQNRNNFASWRQAELERVSPEELLAISRSDYYCW
CLDS
SEQIDNO: 344
CTTGCCTACCTAAATTTTCAAGATTTGCACTACTGCTTCCACAACTCTCATGGACTCTAGAAATGAGTCATCTGAGACTTTAAGGA
ACAAGTGTGCAGCTTGCTTCAGACAATTCAACAGAATGGAGCACTTAGTGGAGCACATGAGAATCTCCTATCATTCTGTTCATGA
ACCCATGTGTGGAATCTGTAAGAAACACTGCAGATCCTTTGAATCCTTAAGGGAACATCTTATAGGGCCACTGCCTAAACAAGA
ATGCAAAAATATCTTCAGTATCCGAGGATGTAAATTTTGCTTGAACATCTTTGATAGCTACAGTTCTCGCATGATTCATCAAGAAA
GATGCCAGCTATCAAATCTTAGTACTGGACTAATTGCTCGCATGTCTAGTTTAGGACTGCGAGACCACCTCATGATCGACAATG
GCTACGCAGTAGGTAATCAAGTAGTTGCTCTGGCATGCAAAATGGTAGGAGGAGGCAGTGATGGCTCTCTAGACCTTTGTGGA
AGGGTTTGCCTCATTGATGAGAATGAAAATATTATCTTCCACACTTATGTCAAACCACCAATTCCAGTGACCAATTACAGGTATG
AAAGCACAGGGATTCGGCCCGAGTACCTGAGGGATGCAATGCCATTGAAGATGGTTCAATCTAAGATTCAGAACTTCCTTTGCA
ATGGTGAACCAATGTGGAAAATTCGACCCAGGGGAGGAAAAGCAAGGATTCTTGTTGGTCATGGTTTGGACCATGATCTTGACC
GTCTTCAACTAGAATATCCAGCTGTAATGATCAGGGATACAGCAAAATATCCTCCATTGATGAAAACAAGCAAGCTCAGCAACTC
ACTCAAATACCTAACTCAGGCCTATCTTGGATATGACATTCAAACTGGCATACAAGATCCATATGAGGATTGTGTTGCAACAATG
AGACTTTACATGAGAATGAGATATCAGCGACATGCAGTAGAAGCTTACCCATTTGCTTCAGACCCACAAAATCGAAACAATTTTG
CTTCATGGAGGCAAGCTGAGCTTGAAAGGGTGAGCCCAGAAGAATTGCTTGCAATATCAAGGTCTGATTACTATTGTTGGTGCT
TGGATTCTTAGAGGAAATGGATGTTAATTCCTACAGGAACCAACTTAATTCATCAACACACATGATTTATGTACGTGTGTTGACCA
TTGGAAACAAGGACTTGAGAACTATCCAATACTTAAGATAGCTAGGAAGAATAATTAATAAGTTGGAGATATATGATGTATGTGTT
TCCATTAGCTACTTAGTACTTACAGTGTAGTAGTGTCATTTAAAACTAAATTTATATAAGCTGCTTAAAAATAAATGGAATCCAACT
TATTTATTGGCTGA
SEQIDNO: 345
CTTGCCTACCTAAATTTTCAAGATTTGCACTACTGCTTCCACAACTCTCATGGACTCTAGAAATGAGTCATCTGAGACTTTAAGGT
GCTCTTTCCCTCTCCTTCTCTCTCTCTCTCATTTCTTGGCACACAGTTTTATCTCACATCAATTAGATATGTAGGTAATGTGAACTT
AAAAGTAAATTTTTCTCTAAATTAGCTAGATTTTGGAGATAAATTAGGCCGGTTCGATTTTTTTATCATACTATAAAAGTTTTCAAA
TTTCATACTCTAACATATTAAAATTTTTCAGTATCGATTGGAGATTCTGATACTAAGTTAAATTTAATTAAGGAAAAAAGTATTTAAA
ACTTTATAAAAAAGACATTATCTTACCATAAATCGATGTGGGATTAAACAAAGATGAGTTATATTATAAGAATAGCTCTTTCTATTT
GAAATATTATACTGCAACCGGTGAAAAATTTCACCACGGATGAGGGTTCTCGACATGCATGCATGATCCCAATGATGCTATATGT
ATAGTGCATGACTATAATAGTACCACATGCAGGAACAAGTGTGCAGCTTGCTTCAGACAATTCAACAGAATGGAGCACTTAGTG
GAGCACATGAGAATCTCCTATCATTCTGTTCATGAACCCATGTGTGGAATCTGTAAGAAACACTGCAGATCCTTTGAATCCTTAA
GGGAACATCTTATAGGTAAACTTCAATCATAAATTCTCCTCACTCGTATAATCTCCAGTTTTCTCTCATTACAAGGGTTTTTAATAT
CAAGGGTCTAATTTGTTAATTTCTACAGGGCCACTGCCTAAACAAGAATGCAAAAATATCTTCAGTATCCGAGGATGTAAATTTT
GCTTGAACATCTTTGATAGCTACAGTTCTCGCATGATTCATCAAGAAAGATGCCAGCTATCAAATCTTAGTACTGTATGAATCATC
TTCACCCTTGTGAATTATTGTTATTACACTTCCATATTAATTAATGATGAAACCCCTTTTGCTAATTTCCCTAATTGGTTTTGTTGTT
TTTTTGTAGGGACTAATTGCTCGCATGTCTAGTTTAGGACTGCGAGACCACCTCATGATCGACAATGGCTACGCAGTAGGTAAT
CAAGTAGTTGCTCTGGCATGCAAAATGGTAGGAGGAGGCAGTGATGGCTCTCTAGACCTTTGTGGAAGGGTTTGCCTCATTGAT
GAGAATGAAAATATTATCTTCCACACTTATGTCAAACCACCAATTCCAGTGACCAATTACAGGTATTGATTTTAACTTAGTCATGT
TAGAGTCATCTTTGCACTTATAAACTTTCGAATTTAAGTCTCAATCGGAGCTAAATAAAAAAAAAAAAAAAAAAAAGAAAATTATCA
AGAGTCTTTGATCGATTCTTGCAAAACTTTGCAGGTATGAAAGCACAGGGATTCGGCCCGAGTACCTGAGGGATGCAATGCCAT
TGAAGATGGTTCAATCTAAGATTCAGAACTTCCTTTGCAATGGTGAACCAATGTGGAAAATTCGACCCAGGGGAGGAAAAGCAA
GGATTCTTGTTGGTCATGGTTTGGACCATGATCTTGACCGTCTTCAACTAGAATATCCAGCTGTAATGATCAGGTAATAAAGGTC
CTCCCGACAGCTAAAAGTTTCACCCTGTTTCCTTATAGCTCTCTCCCTAGCAATTATAAAGTAAAGCGGTTATATCAAGTAGGATT
AACTATACAGTACAAATTAAAGATAGACAACTATATAAATATAACCTAGTATAAATGAGTAAACCCTAATAATTTTTTTTCAAAAAA
AAAAACTATTTTTATATAATTATTTATTTGTTATTGACTTATTATACTATATAGACAATTTTATATGATATAATGGCTTTTACGGTATA
ATTTTTTCTCACTCTTCTTTTTTTTGAATTGTTTTGAGAAACCCGTTAATATAAAAGCACCTTGGATGGATTCCATTACAGGGATAC
AGCAAAATATCCTCCATTGATGAAAACAAGCAAGCTCAGCAACTCACTCAAATACCTAACTCAGGCCTATCTTGGGTATGTATTA
TCTTTTTTTTTTTTTCCCTTCTACATGTTTAGTGTGCCTAAAAGTTTTTAACGCACAGATATGACATTCAAACTGGCATACAAGATC
CATATGAGGATTGTGTTGCAACAATGAGACTTTACATGAGAATGAGATATCAGCGACATGCAGTAGAAGCTTACCCATTTGCTTC
AGACCCACAAAATCGAAACAATTTTGCTTCATGGAGGCAAGCTGAGCTTGAAAGGGTGAGCCCAGAAGAATTGCTTGCAATATC
AAGGTCTGATTACTATTGTTGGTGCTTGGATTCTTAGAGGAAATGGATGTTAATTCCTACAGGAACCAACTTAATTCATCAACACA
CATGATTTATGTACGTGTGTTGACCATTGGAAACAAGGACTTGAGAACTATCCAATACTTAAGATAGCTAGGAAGAATAATTAATA
AGTTGGAGATATATGATGTATGTGTTTCCATTAGCTACTTAGTACTTACAGTGTAGTAGTGTCATTTAAAACTAAATTTATATAAGC
TGCTTAAAAATAAATGGAATCCAACTTATTTATTGGCTGA
SEQIDNO: 346
MASRNESSDTLRNKCAACFRQFNKMEHLVEHMRISYHSVHEPICGICKKHCRSFESLREHLIGPLPKQECKIIFDVVGCKFCLTILDSY
NSRMIHQGRCQLSNGLIARMPNLGLRDNLTIDSGYTRGPQVVALACKMVGGGNDGSVDLCGRICLIDENENIIFHTYVKPPVPVANFR
YESSGIRPEYLRDAMPLRLVQSKVQNFLCNGEPLWKVRPRGGKARILVGHCLDHDLDLLQLEYPAMMIRDTAKYPPLMKTSKLSNSL
KYLTQAYLGYDIQTGIQDPYEDCVAIMRLYMRMRSQKHAPEDYPLASDPQNRNNFASWRQAELERMSPEEMLAISRSDYYCWCLDS
SEQIDNO: 347
CTCAGGATCAACACTGCTACTTCCACAACTCTCATGGCCTCTAGAAATGAGTCATCTGATACTCTAAGGAACAAGTGTGCAGCTT
GCTTCAGACAATTCAACAAAATGGAACACCTAGTGGAGCACATGAGAATCTCCTATCACTCAGTTCATGAACCCATTTGTGGAAT
CTGTAAGAAACACTGCAGATCCTTTGAATCCTTGAGGGAACATCTTATAGGTCCACTGCCTAAGCAAGAATGCAAAATTATTTTC
GATGTCGTAGGATGCAAATTTTGCTTGACCATCCTTGATAGCTACAATTCTCGCATGATTCATCAAGGAAGATGCCAACTTTCAA
ATGGACTGATTGCTCGCATGCCTAACTTAGGCCTGCGAGACAACTTGACAATTGACAGTGGCTACACAAGAGGTCCTCAAGTAG
TTGCTCTTGCCTGCAAAATGGTAGGAGGCGGCAATGATGGCTCTGTAGACCTTTGTGGAAGGATTTGCCTTATTGATGAGAACG
AAAATATAATCTTCCACACTTATGTAAAACCACCAGTTCCTGTTGCCAATTTCAGGTATGAAAGTAGTGGCATTCGGCCTGAGTA
CTTAAGGGATGCAATGCCACTGAGGTTGGTTCAATCCAAGGTTCAGAACTTCCTTTGCAATGGAGAACCCTTGTGGAAAGTTCG
ACCCAGAGGAGGAAAAGCAAGGATTCTTGTGGGTCATTGTTTGGACCATGACCTTGACCTTTTACAACTAGAATATCCAGCTAT
GATGATCAGGGATACAGCAAAATATCCTCCATTGATGAAAACAAGCAAGCTCAGCAACTCACTCAAGTACCTAACACAGGCCTA
TCTTGGGTATGATATTCAAACTGGCATTCAAGACCCTTATGAGGATTGTGTTGCAATAATGAGGCTTTACATGAGAATGAGATCC
CAAAAGCATGCACCAGAAGATTACCCACTTGCTTCAGATCCACAAAATCGAAACAATTTTGCTTCATGGAGGCAAGCTGAGCTT
GAGAGGATGAGCCCAGAAGAAATGCTTGCAATATCAAGGTCTGATTACTATTGTTGGTGCTTGGACTCCTAGAGGAAATGGATG
TTAATCCTAAACAATGGAGCTAAAATCCTTCAACACATATATGATATATATCAGTCCAATGGTGGAAAGAATTACCATAATTATCC
AATATTTATTACAGCTAGGAAAATAATTAATAAATTGGAAATATATTATATGCATATTTCCATGAGCTACTTAATTAATTATTCTGTA
GTAATCCATGCAGCTGA
SEQIDNO: 348
CTCAGGATCAACACTGCTACTTCCACAACTCTCATGGCCTCTAGAAATGAGTCATCTGATACTCTAAGGTTCTCTCTCTCTCTCT
CTTTCTCTCTCTTGTGTAGCACACATATGGATGTGTTTGTCTAGATCCCTACCTTAAATTATTTACTTCAAGATAGATTAGCATCCA
ATGTTTAGGATCAGGATGGTTTCTTTCATTTGTGTGGATCTTAGAATGTATTGTCATACTATGTTTTTCTTGGATTCTAATAAAACT
TTTCTTATAAAAAAATTATAACGTATTGTTTCGTATCCATTTTTCATGATCGGTATGAACATAAATATATTGAATGCCAAACCATAA
AATTTATATGCTTTTCCTTGTACTATGTTTGTGCACATTACTAGAAAATTTTATATTAACTAATTGTTGTATATACTATGATTAACGG
CTATAATATATAATCTTCGAATATACAAAAATTGTATTATAAAATTTCGTTAGACTCCGATTAAATAGGCTTTCCGAACTAAATGAA
TATAGGATTTTTTGATAGCATGATATTAGTTATTGAGGTATAATATATATAAAGTGCCAAAACTAATAATATTTGCATTTGTATTTG
CAGGAACAAGTGTGCAGCTTGCTTCAGACAATTCAACAAAATGGAACACCTAGTGGAGCACATGAGAATCTCCTATCACTCAGT
TCATGAACCCATTTGTGGAATCTGTAAGAAACACTGCAGATCCTTTGAATCCTTGAGGGAACATCTTATAGGTAATAATTTTTCAG
TAAGAACTTATCCTCACTCAGATAATCTCCAGCTAGTTTCCTATTATTATTAAGGGTTTAATTTGCATGCTTTGCTTCTACAGGTCC
ACTGCCTAAGCAAGAATGCAAAATTATTTTCGATGTCGTAGGATGCAAATTTTGCTTGACCATCCTTGATAGCTACAATTCTCGC
ATGATTCATCAAGGAAGATGCCAACTTTCAAATGTTAATGCTGTATTGATCGTCAACTTCAGTACCCTTTATTAATTAATTAGCAAT
TTCCATAGTCTAGCTAAGTATTTGCTGGGTTGTTGCTTGCTTTAGGGACTGATTGCTCGCATGCCTAACTTAGGCCTGCGAGACA
ACTTGACAATTGACAGTGGCTACACAAGAGGTCCTCAAGTAGTTGCTCTTGCCTGCAAAATGGTAGGAGGCGGCAATGATGGC
TCTGTAGACCTTTGTGGAAGGATTTGCCTTATTGATGAGAACGAAAATATAATCTTCCACACTTATGTAAAACCACCAGTTCCTGT
TGCCAATTTCAGGTAACAATATTGCGTACTATGTTTTTTCGAAAATCAAAATTTGAACTGCTATGTTACTATTATGGAATTTTCTGA
TTCGGAGAGATTGCGAATGATTGTTGTGAAGGTTCATATATTGAGCTTAGGGTTGCTTCTATCAAAATTTTTTTAATGTGGGACAT
TCAGCAACCAGGCAATGTAAATGTTAGCTGTGTTTATTGATTCTTGCAAATACTTTGCAGGTATGAAAGTAGTGGCATTCGGCCT
GAGTACTTAAGGGATGCAATGCCACTGAGGTTGGTTCAATCCAAGGTTCAGAACTTCCTTTGCAATGGAGAACCCTTGTGGAAA
GTTCGACCCAGAGGAGGAAAAGCAAGGATTCTTGTGGGTCATTGTTTGGACCATGACCTTGACCTTTTACAACTAGAATATCCA
GCTATGATGATCAGGTAAATAAAGCTTCTACTGCTAGAAGCTAGCCAAGTTGCAACTTTTTTAAATGAAAACTCATTTCTTTTCAA
TTATTCTGAGTAACCTTGTGAGAAAAAGTATCTTGAATGGATTCCATTACAGGGATACAGCAAAATATCCTCCATTGATGAAAACA
AGCAAGCTCAGCAACTCACTCAAGTACCTAACACAGGCCTATCTTGGGTATGTACTCTTGTTTCCTCTTCGTCTAAATTTCTCTTA
TATAACATATACTTTAATATCATCTGCCTATATATTTAAGGAAAAATTATCATTTGGTCCATGAAATATAGAAAAACCCATTAATTA
GTCCCTTAATTTAAAAAAAATACATTATAATGTCATTATAATTTTATAGGTATGATATTCAAACTGGCATTCAAGACCCTTATGAGG
ATTGTGTTGCAATAATGAGGCTTTACATGAGAATGAGATCCCAAAAGCATGCACCAGAAGATTACCCACTTGCTTCAGATCCACA
AAATCGAAACAATTTTGCTTCATGGAGGCAAGCTGAGCTTGAGAGGATGAGCCCAGAAGAAATGCTTGCAATATCAAGGTCTGA
TTACTATTGTTGGTGCTTGGACTCCTAGAGGAAATGGATGTTAATCCTAAACAATGGAGCTAAAATCCTTCAACACATATATGATA
TATATCAGTCCAATGGTGGAAAGAATTACCATAATTATCCAATATTTATTACAGCTAGGAAAATAATTAATAAATTGGAAATATATT
ATATGCATATTTCCATGAGCTACTTAATTAATTATTCTGTAGTAATCCATGCAGCTGA
SEQIDNO: 349
MDSDSYPPTKALTTRYKCYACYKQYKKKEHLVEHMKISYHSAHQPRCAVCQKHCKSFESLREHLTGPLAKTNCLGIFSDRGCDLCLE
VFDSPSSLNKHREMCCLSAPASLATEIPTCTESQIYVSGSIDESYACKGGEAVAIDCEMVGGGSDGSLDLCARVCLLDEDENIIFHSYV
QPQIPVTNYRYEVTGLTEKHLRDAMPLKEVQNKILEILYNGESIGKLRLSGGNARLLVGHSLDHDLDCLRMFYPDHLLRDTAKYRPLM
KTNLVSHSLKYLVQTYLGYNIQTGVHDPYEDCVSVMRLYKRMRAQNHHVEGSGIQSICGGFDFWKPKELEKMTPEKLYEISRSNYRC
WCLDLKGQQPGLI
SEQIDNO: 350
CCAGTCTCCTTTCCAAGTCCCGGCTGTGTTCAGTCCCTGTGAATCCTTCGGCTTAACTTTTCCTATTGATCAAGAAAAAAAATAC
CCCACTGATTTTAGCGGATTTCAGCTACATGGATTCCGATTCTTACCCACCAACAAAAGCCCTAACCACAAGGTACAAATGTTAT
GCATGCTACAAGCAATATAAGAAAAAGGAACATCTTGTTGAACACATGAAGATCTCGTACCACTCAGCTCATCAGCCCAGATGT
GCAGTTTGTCAGAAACACTGCAAATCTTTTGAATCTCTGAGAGAACATCTTACAGGTCCGCTGGCAAAAACAAATTGTTTGGGTA
TTTTCTCGGACCGAGGTTGTGATCTTTGCTTGGAAGTTTTTGATAGCCCTTCTTCTCTTAACAAGCACAGGGAAATGTGTTGCCT
TTCTGCACCTGCTTCCCTTGCAACTGAGATACCAACTTGCACAGAATCACAGATTTATGTTTCAGGATCAATTGATGAATCTTATG
CTTGCAAAGGTGGTGAAGCTGTTGCTATTGACTGTGAAATGGTTGGTGGTGGAAGTGATGGATCACTTGATCTTTGTGCTAGGG
TGTGCCTTCTTGATGAAGATGAAAACATAATTTTCCACTCGTACGTTCAACCTCAAATTCCTGTAACCAACTACAGATATGAAGTA
ACTGGGTTAACTGAAAAACATCTAAGAGATGCCATGCCGCTTAAGGAAGTGCAAAATAAAATATTAGAAATTTTGTACAATGGGG
AATCTATTGGAAAACTAAGGTTGAGTGGTGGAAATGCAAGGCTTCTTGTCGGTCATTCACTGGACCATGATTTGGATTGTTTGAG
AATGTTCTATCCTGATCATCTGTTGAGGGATACAGCAAAATACCGTCCTTTGATGAAGACTAATCTGGTTAGCCACTCACTGAAG
TACCTTGTGCAAACCTATCTAGGATATAATATTCAGACAGGGGTACATGATCCTTATGAAGACTGTGTGTCAGTGATGAGACTTT
ACAAGAGAATGCGTGCCCAAAATCATCATGTTGAAGGTTCAGGGATACAAAGTATATGTGGTGGTTTTGACTTCTGGAAACCCA
AGGAACTTGAGAAGATGACTCCAGAGAAGCTATATGAGATCTCAAGATCAAACTACAGATGTTGGTGCCTGGACTTAAAAGGCC
AGCAACCCGGCTTAATATAGATCTTCTGAACAAGTAGAAAAATTGAGAGGTTCAACAGCTGTAAATGGGATCCTGCAGTTCTTTC
TCGCCTTTTGGTTTTTGAGGAGTCTGCCAAGCTATGGTGGCTATTTTTGGCTGCTCACAGGTTATAAACATGACGTCTAAGATTT
GAAATAGTTTCTTAAAATTAATTATTGATCAGTATGGGTGTCTGGGTGGAGAAGAAAATCTTGGTCCCAAGAGTTTCTGTACAGT
TTCATAGATATAATAGTATATATCTTTGATATTATAACTTATTTTAATGAAATTTTATGGTCATGTAATGTTTTCTTTCACCGCTGAT
TTT
SEQIDNO: 351
CCAGTCTCCTTTCCAAGTCCCGGCTGTGTTCAGTCCCTGTGAATCCTTCGGCTTAACTTTTCCTATTGATCAAGAAAAAAAATAC
CCCACTGATTTTAGCGGATTTCAGCTACATGGATTCCGATTCTTACCCACCAACAAAAGCCCTAACCACAAGGTTCTTCCCTCTG
TCTCTCTGTGTGTTGCTGCTTGGTTTGAAGGGAAAATGTGGAAAAGGAATGAATTTTACTTCTCGTTTTCGCTGTATTTGCGCGT
GTACTGTATACAATTCCCTGGAATAATGATCATTTTAGGCCTCCTCTATATTCTACTCAAGTGTAGTTGTTTCTACTAATCCAAGTA
GACTAACCTTGGCGAGTACCATAATAGTAACTTACATTTAGAGTGTAAAATCAATTGCAGACATGCCTGTATTAGAGTAATATCAC
GATGTGATAGAAAATTGCTGAACATATCATTATGCATTGTCAATAATACATATCCATCCATCAGGAAATTTCCAGAATTTTCCATAT
GGAATTTCAGACGAATTTCTTTGCAGAAAGACATATACCTTCCGTTTAGCATGATTCATTTTACAATAAAAGATATCAAATGAATT
CTTGCAAGATTTCTACTTCTCTTAAAATGATTTTTTTTTAAAGATAAAAAGAATTGTATTCTTTCATTCCATATAAGATAATTGTTAG
AAAAGAAATCAATTGAATTGAATTCTTATAAAATTTTTTATTCCAAACAGAGGATAATTTTTTAAAAAAAACAGAGGGATAATGCTT
AGTTGCATATTTTGTTATTACTTGTTATATTAATCAATAAACTATATGACTGACCAACTTCAGTTTCCAGTATATAAAATTGGCATTA
TTGTTTTGGATTCTAGAGTGATGAGTAGATATCTTGGTCTGATTTAAATAGGATAATTGAAAATAATGTATTTGTTTGCAGGTACA
AATGTTATGCATGCTACAAGCAATATAAGAAAAAGGAACATCTTGTTGAACACATGAAGATCTCGTACCACTCAGCTCATCAGCC
CAGATGTGCAGTTTGTCAGAAACACTGCAAATCTTTTGAATCTCTGAGAGAACATCTTACAGGTGTGGTTCTATTCCATGTTTATC
CTGCTGTATCTGTTAATAAGTTGATTATTTTGGCTTATACTCTTATCGTTTAGGTCCGCTGGCAAAAACAAATTGTTTGGGTATTTT
CTCGGACCGAGGTTGTGATCTTTGCTTGGAAGTTTTTGATAGCCCTTCTTCTCTTAACAAGCACAGGGAAATGTGTTGCCTTTCT
GCACCTGCTTCCCTTGTAAGTGGATTGTTAAGATTTGAAGGATTCCTTGAAGAAATTAAGAAACCAATCTTTTTATATTGCTTCTA
GTTTATTTTTCTCTTTTAAGGGGTCAATTAGTGAAGGTTATCATCATCACTTGCTTTTAGGTGCATAAATTTGGAACTTTCTGTTGT
TTATTGTAGGCAACTGAGATACCAACTTGCACAGAATCACAGATTTATGTTTCAGGATCAATTGATGAATCTTATGCTTGCAAAG
GTGGTGAAGCTGTTGCTATTGACTGTGAAATGGTTGGTGGTGGAAGTGATGGATCACTTGATCTTTGTGCTAGGGTGTGCCTTC
TTGATGAAGATGAAAACATAATTTTCCACTCGTACGTTCAACCTCAAATTCCTGTAACCAACTACAGGTACTTTTAAAATCCTATG
TTATCATTTAATTCTTCAAAATACAGAAAGCATTATTAGGTATATTGTCATTCACATCTATTCAAATGTTTCAGATATGAAGTAACT
GGGTTAACTGAAAAACATCTAAGAGATGCCATGCCGCTTAAGGAAGTGCAAAATAAAATATTAGAAATTTTGTACAATGGGGAAT
CTATTGGAAAACTAAGGTTGAGTGGTGGAAATGCAAGGCTTCTTGTCGGTCATTCACTGGACCATGATTTGGATTGTTTGAGAAT
GTTCTATCCTGATCATCTGTTGAGGTACATTTATATTAGATAGACTGACATGATATAAGATTAGCTCATTTAATGTTCCATGATGAT
GAAGTTATTTTGGATGAATCCTTATGGTACTTGATACATATTATACATATCTCCATTTGGCAAAAATCAATTTGCCCATTTCTGGG
GGGAAGGAATCCTAAGATATTACCATCAGTGACCTTGTCTGGGACTTGGTTAATATCATAGACATTTTACTGGTATGTAACCAAG
TCATGTTTCCTCACATTAATTGGATACAGTATCTTTTCTTTGTGTATCAAGCATCACTGGGATTCTGGAATTGATGATTTTGCAAT
GACTGTTTTCTAGTGTAATAACTGTCCAATATCCTTTCAGAAATATGTGGACATTCCTAATTGCTTATGTGATTATATTATCATAAG
GGCAGTTCTTTGAGGCATTAAACACCTTCCCATCAGCGGCTGGCAATCTTTAGAATCATCAGAATAGTTCACTATTTTTTGGCAA
GTCTTATATGAGCAATCATAATGAGTTTGTCTTGGTACTTGCAAACTAAAAATTGATTGTTGTTAACGTAAATACTGAGGAGCTCT
ATTGAGTAAATAAATAGAGGAAATAAAGTAAACAGGTTTAGTAAAGTTCTATTGATAGATTTTCTTCCTTCAGATATTTATATCTGG
AACAAATAATTTGTACTATTCAATATAATTCTTTTTTTGGTGTGCTCTCCCCAGTTTTACATACTTTAGCAGTGTTACACTTTCCGC
CAGTTGACCAAAAGAGTCTTGATCTTTGTGTGGTTTTTCAGTTTTGGCCCAACCAGTTAAACTTTAATTGGTTTTATTGTGTCTAA
TATAGTGAGGTTATTTGAAATGTGTATTTAGGAAGCTCGGCTGCTAAAATTTACTTATTTTCTGTATGGTATTAAATTTTGATCATT
TAGGGATACAGCAAAATACCGTCCTTTGATGAAGACTAATCTGGTTAGCCACTCACTGAAGTACCTTGTGCAAACCTATCTAGG
GTAAGTCACTCATCCTTTCTGGTTTATTGCTCATGCTGATGTTGAATTACTCTACAATGTTTATGCATTTATTTTTTGCTCTTCTTC
TTTTTCCCGATTCCTTTTATTATTACCTATTTGAATTCCTCTGCGCTATCTATATTGCTGTTTCTTTTTTTGGAAGTCAAATGCTTGA
AATGACATACTTTAACTCTTTGTTATACACTCTGATTTTACAATGCAGATTTTATGCCTTTTAGGATTATCCATTCCAGTGGAATGT
TTTGCATTATGATGATGCTTAAAAGAATGAAGTAACATGTTCATATACATTACAATACTAAATGTTTGTGGTCCCAGAATTTGTTTA
AGAGACCAACAAGTTTTCTAAACTTGTAGTGGAAAAGACTGGAACAATATCCAAACAGGAATTTTGGGGAAGTCGGTTGAAGTA
GAGTTTAAGATTTGGCAAAAAAGACTTTTATGTCTTCTTTTTTTTTTTTATTGTGGAAGTGGTGGGTGTGTTGGGTAAGTCTCTTC
CTCTTTGATGCTGTTCTTCTTTGACATGAGAGGATAGATTACCTAAAATCACATATTTCTTCTGCTTGCAGCTAACAGATGTAACT
TTAGCTGAATTTGACAAACATCATATTCTTCCATTTACTTAAGGCCACTCTGACAAGTGACAAAACATCATACTTACTACAAGACA
ACATGCTTACTTTTACCTTTTTTCACTGTTACACGGGCCTTGACTATGTAATCTACCAGAAAAAAAAGCCATCCGCTTGTCATAAC
AAAATTTCTGCTTCACAGATATAATATTCAGACAGGGGTACATGATCCTTATGAAGACTGTGTGTCAGTGATGAGACTTTACAAG
AGAATGCGTGCCCAAAATCATCATGTTGAAGGTTCAGGGATACAAAGTATATGTGGTGGTTTTGACTTCTGGAAACCCAAGGAA
CTTGAGAAGATGACTCCAGAGAAGCTATATGAGATCTCAAGATCAAACTACAGATGTTGGTGCCTGGACTTAAAAGGCCAGCAA
CCCGGCTTAATATAGATCTTCTGAACAAGTAGAAAAATTGAGAGGTAATGCCATTATTTTCCTGCTTTGCTACATGCATTATGGAT
AAGGTCACATACCCCAATCATTATTAAAATTTCAGAACACTTGTTACACCCTTGCTGAACATTACATCCTCGTGTTCAGACCATAA
ACTTTCTTCATTGACATTTGAAGAGGTTTGTATAAATCAATCATTGACTGGCCAGTCTGCCCCTCACAGAGCCTCAGTTCTTTCCA
TGTTAATGATGTATATTGTTGTCTTTATATTTTGGATTTCTTTATTAGATCTCATTTTTACATTCTCAGCGCAATAGTGATTGTATAT
TATATACATTTTGTAGGTTCAACAGCTGTAAATGGGATCCTGCAGTTCTTTCTCGCCTTTTGGTTTTTGAGGAGTCTGCCAAGCTA
TGGTGGCTATTTTTGGCTGCTCACAGGTTATAAACATGACGTCTAAGATTTGAAATAGTTTCTTAAAATTAATTATTGATCAGTAT
GGGTGTCTGGGTGGAGAAGAAAATCTTGGTCCCAAGAGTTTCTGTACAGTTTCATAGATATAATAGTATATATCTTTGATATTATA
ACTTATTTTAATGAAATTTTATGGTCATGTAATGTTTTCTTTCACCGCTGATTTT
SEQIDNO: 352
MESSESMRNKCAACFRQFIRMEHLVDHMRTTYHSVHEPTCGVCKKHCRSFESLREHLIGPLPKQECKNLFNIRGCKFCLAILDSPYAL
RIHQDRCQLSGVNYGIAARLANLGLRDSLTIDNGFSRGPQVVALACKMVGAGSDGSLDLCARVCIIDENENMIYHTYVKPPIPVTNYRY
ETTGIRPEYLRDATPLRQVQRRIQDFLFNGEPMWKIRSPKGGKARILVGHGLDHDLDRLQVEYPAIMIRDTAKYPPLMKTSKLSNSLKY
LTQAYLGYDIQTGIQDPYEDCVATMRLYMRMRNQAHRRENYPLASDPQNRNNFASWRQSELERMSPEEMLATSRSDYYCWCLDSE
SEQIDNO: 353
AAAATCATGACACCAGATTAAAGAAGAATACAAAACCCGACACTCAACATTCCTAGTTACGCAAAGACCAGCTTAGCACTGTCCT
CAAATTAACATATGGACAAGTATCTCAAAGCTTGATTCACTAGAGTGTGATCCCACACTTAGCAAGACGCAACGACAGTGGAGT
AACAGCAGCATCCAGTCCCACAGATATCAGCTGACGACAAGAGCTTCCAAACTCAAACAGAAACCCAGGCCATCCAACCCTAG
CATCAAGAAAGTACCTTGGTATCATTTCAAAGCTCAGCACCAACAGGTATCACAACTCAGCATTCGAATCTAACTTGTGTGGTAA
TTTTTTCAAAGAAGGAATTTTATTGTAATGACTTTTTTCTAGAGTAAGTTTGTTGTGAAAGTGAGGGGATGAACTGGAGATGAGAT
GGAATGGAATGGAATGGAGCTTTAGTGAAGTAAGAGGGAGAGAGGATCTGATCCCCCGGTTAGGTCCTTCTAAAGTAACACAC
GCTAAATTTTCGACGCTCATCATAACAAGATGGAGTCTTCAGAAAGCATGCGGAACAAATGCGCGGCATGCTTCAGACAGTTCA
TCAGAATGGAGCACCTGGTCGACCACATGAGAACTACATATCATTCAGTTCATGAACCTACTTGCGGAGTGTGTAAGAAACACT
GCAGGTCGTTTGAATCGCTAAGGGAACATCTTATAGGTCCATTGCCGAAACAAGAGTGCAAGAATTTGTTCAACATCCGAGGAT
GCAAATTCTGCTTAGCCATTCTGGATAGCCCATATGCTCTTAGGATCCATCAAGACAGATGCCAGCTCTCGGGAGTAAATTATG
GAATAGCGGCTCGTCTGGCTAACTTAGGTCTTCGTGATAGCTTGACAATCGACAATGGTTTTTCAAGAGGCCCGCAAGTAGTTG
CACTAGCTTGCAAAATGGTTGGTGCTGGCAGTGACGGCTCATTAGATCTTTGTGCAAGGGTTTGCATCATTGATGAAAATGAGA
ATATGATCTACCATACTTATGTCAAACCACCAATTCCAGTTACAAACTACAGGTATGAAACCACAGGCATTCGACCAGAATATTT
GAGAGATGCAACGCCATTGAGACAAGTGCAAAGAAGGATTCAAGACTTCCTTTTCAATGGAGAACCAATGTGGAAAATTCGATC
ACCTAAAGGTGGAAAAGCCAGGATTCTCGTGGGTCATGGTCTTGATCATGACCTTGACCGTCTCCAAGTAGAATACCCAGCAAT
CATGATAAGGGATACTGCAAAATATCCTCCGTTAATGAAAACAAGCAAACTTAGCAACTCACTCAAGTACTTAACCCAAGCATAC
CTGGGGTATGACATCCAAACCGGCATTCAAGACCCTTATGAGGACTGCGTTGCCACAATGAGGCTTTACATGAGGATGAGGAA
TCAAGCTCATAGGAGAGAAAACTATCCACTGGCTTCTGACCCTCAAAACCGAAACAACTTTGCATCATGGAGGCAAAGTGAGCT
CGAGAGGATGTCCCCAGAAGAAATGCTGGCTACCTCAAGGTCTGACTACTACTGTTGGTGTTTGGACTCTGAATGAGCATTGAA
CGCCAGCATATATATGTGTAGTTCTCATGTGGTCAAACAGGTGTTCCATTCTGATTAAAGTTTAAGGATGCTA
SEQIDNO: 354
AAAATCATGACACCAGATTAAAGAAGAATACAAAACCCGACACTCAACATTCCTAGTTACGCAAAGACCAGCTTAGCACTGTCCT
CAAATTAACATATGGACAAGTATCTCAAAGCTTGATTCACTAGAGTGTGATCCCACACTTAGCAAGACGCAACGACAGTGGAGT
AACAGCAGCATCCAGTCCCACAGATATCAGCTGACGACAAGAGCTTCCAAACTCAAACAGAAACCCAGGCCATCCAACCCTAG
CATCAAGAAAGTACCTTGGTATCATTTCAAAGCTCAGCACCAACAGGTATCACAACTCAGCATTCGAATCTAACTTGTGTGGTAA
TTTTTTCAAAGAAGGAATTTTATTGTAATGACTTTTTTCTAGAGTAAGTTTGTTGTGAAAGTGAGGGGATGAACTGGAGATGAGAT
GGAATGGAATGGAATGGAGCTTTAGTGAAGTAAGAGGGAGAGAGGATCTGATCCCCCGGTTAGGTCAAAGGGGCAACTTTATT
TATTTTTTTGGACCTTTTTGAAAGGTTCTGATCTCTTTTCTTTCTTTTCAATTTTGACTTTTATTGATTCACTGAAAATTAAGGGGAT
ATAACATATGTGTGGTTCAAAATGCCAAATAGTTTGGCCACAGACTGGCCCCCTCAATGACATTAATTCCTTCACCTCCTTTGAA
ACTAGTCAAAAATAAGCTTTTTCTGTAGTGAACCAAGCTGTGCAGGTTCTATATGAGGGTTACAGTCAGCAGGGTGCATATGGA
CCATTTCTTCATCCACTGTACATGTGCAGTTTTAAGTTGAAGGGTACCCCCATTTATATATCATCAGATTCCCATACCCAACAATG
TTTTCACCAATGATTTTAGAATAATTGCCAATGTAGGTCAGGCATTAAGTTAAAGAACTTTTAACATGATCGATGTCTAGGCGATC
GACATTTTTAAATCAAATATTAATAAATAAAGAATCGAGATGTCTCATCTTTTTATTTTTTTTTAAAAATATTATATCAAATAAATCGA
TATAAATAAAGAAAGACAAAACATATCGCAGTTAATTTTTCTTACTAAAAAGCAAGTIGTGATTAGAGCCCAAGTTTGCCAACAGG
TTACAGCTGCCCCTTTTTATAGCATGCCTAAGGGCATTCCAACATGCATGTAAGTGATTAAAAACCATCATATACACACAGAAATT
TAATGCACAAGCTGCTCCAATAATCTATGTAAGTAAGAGTTATCAGAGGATAAAGAAATTGAATTTATGGCAATTOCCATATATAA
TTTTCAACAGGAGTAGGAACATACACATCTTAGTTGATTTGGAAAAATTTTATCAAATGCTAAACTATGTAAAAGTGTCAATGGGG
AAGCTGTGATTGAGAAAAAGCCAGTTATCTTCGTCGAAGGGAGGGCAATCTCTGGGGTGGATTCTGTTTGACTTGTGAATATAG
AGACGTTTATGGGAATGATGGAAATGGGCTTGTATGGAACAGAATCATTAAGGGAAAAAAAGTGCTCTTTCACCTACAACTTTTC
TGTTGGGTATCTTCTTCAAAAGCAACATGGAGGGAATCTCCACCAGGGTCCCTTTAGAGTCAAAAGTGACTCTTTGCTGAAATTC
CCCATGTTTTGTTTTTCTTAAAGTCAAACCTCTTTCTTTCTTGGAAGGAGAAGTAAGTAATTGTGCTTAAGCTTATGCAAACAACC
TTATCTGCCTTCGCCGAAAGTAAAGGGGCTTAAACTTGAATAACTATGAGGGTTTTACCATGAGTCTCTAAAGCCCATTACCCAT
TGGCATTTGCTTTTGCTGGACAGTTTTTGTCATGTCAGCCAACTTGGTCTTGCCCTTTTTTCCTTCACAGTGCAAGACAAAAGAG
ATAAGCTATGGCATTTTCCAGCTTGAAAAAGACCTTATCCCTGCCTTTGCCGAAAGTAAAAGGAGATTAAACTTGATCACGAACT
TACCCCCCATTTTATGCTGGGCAATTTTATCCTTTTGTCTTGTCAGCCAACTTGGGTTTGGCCTTTTCTCCATCCGCATTCAAATT
CGGGAGTTTGTGAACTTCCTACGTTTGTGATAGAAAAGCAAACGATGGAAACAACGCAATCTTTGACCAAATCTTCATGGAAAAA
GTAAGCCATGGACATTGTTTGCATTAGTGAATAGTGCCTTAAGTCACACGACTTCTTAAAGAAGTATGACCAAAGTAGCTCGTGT
TCATCACTTGCACCAGTCTTGTGTTAAATGCACCACAAAAAACCTCTATAAAGAGGGAAATTCAGTATCAAACTGATGACTAAAA
GTGTAGGCCTCTGATCAATTTATACTACAAAAAGAATAGTTAACATGTTGTTTAGCGCATTAAGTAAAGCTAACCATGCACACGG
GCTTGCGCACGTTCATGTGTAAACTCTCACATACACATGCACACATATAAAAAGCAAGGGAGGGATGGAGGAGACAAAGAGTG
AAATATTCTAGTTGATCAGTGGGGCTCCAAGCATCTGGATTACTACGAATGTTCTGGTGCAGAGATAGAGCTTCAAAATTCAAGT
AATTTTCCTCAAGGAATCATCCTTAGGCTCAAGTGGGACACAAATTTCTTCCTTAACTGATATAAATACCCTCCCCTATTCCCTCT
TCTTTCCTCAGGTCCTTCTAAAGTAACACACGCTAAATTTTCGACGCTCATCATAACAAGATGGAGTCTTCAGAAAGCATGCGGT
ATTCTCTCTTCTTACCTGCTCACACAAACATGCAAACACACACAGGCATGCACACATAAAATCACACTAACATATGTATATAAGCA
ACAAACAGAAAGCACTTTGTAGATAAATACTATAGCACAAATGATTTTAATGCTAAATTGATCAAATTATTCGAGCTGCAGGAACA
AATGCGCGGCATGCTTCAGACAGTTCATCAGAATGGAGCACCTGGTCGACCACATGAGAACTACATATCATTCAGTTCATGAAC
CTACTTGCGGAGTGTGTAAGAAACACTGCAGGTCGTTTGAATCGCTAAGGGAACATCTTATAGGTAAGTAATAAATACTAGCACA
TCCATAGGTCTTGTTAATCCAAAGGTTTTCTGAGGACGGACTCTTGACTCTTGAGTACTATTTTGTTCCAAATAGGTCCATTGCC
GAAACAAGAGTGCAAGAATTTGTTCAACATCCGAGGATGCAAATTCTGCTTAGCCATTCTGGATAGCCCATATGCTCTTAGGATC
CATCAAGACAGATGCCAGCTCTCGGGAGTAAATTATGTATGAACCCTTAGCTTGAAATTAAAACTACATATTTCAACTATATTTCC
TTCCCCCTATTCGCAAATTAAGTTTACACTGAAATTTTTACATGATATCTCCTTGTAGGGAATAGCGGCTCGTCTGGCTAACTTAG
GTCTTCGTGATAGCTTGACAATCGACAATGGTTTTTCAAGAGGCCCGCAAGTAGTTGCACTAGCTTGCAAAATGGTTGGTGCTG
GCAGTGACGGCTCATTAGATCTTTGTGCAAGGGTTTGCATCATTGATGAAAATGAGAATATGATCTACCATACTTATGTCAAACC
ACCAATTCCAGTTACAAACTACAGGTACCATTAATGAAAATGAGAATATGACTATGCCAATATGCGAATTCTGAGAATTCCAACAA
ATGGAATCAAACAAACCAATTAGGTTTTCTTCAACTACTTTCAGGTATGAAACCACAGGCATTCGACCAGAATATTTGAGAGATG
CAACGCCATTGAGACAAGTGCAAAGAAGGATTCAAGACTTCCTTTTCAATGGAGAACCAATGTGGAAAATTCGATCACCTAAAG
GTGGAAAAGCCAGGATTCTCGTGGGTCATGGTCTTGATCATGACCTTGACCGTCTCCAAGTAGAATACCCAGCAATCATGATAA
GGTAAAGTTTAAGGATGCTAGCATACATTCAAAAGGAACAGGTGCTGCTGCAATTATTTTATAGTCTAAATTGCACATTCATCTTT
TCCCTATATATTCTACTTCTAGAGACACAGCTCAATGATGAAATTCATGTGGAAAATACAATTAATATGGTATAAGTTTATGTGCC
TACAGGGATACTGCAAAATATCCTCCGTTAATGAAAACAAGCAAACTTAGCAACTCACTCAAGTACTTAACCCAAGCATACCTGG
GGTAAGCGTCTATACACAATATCTATTTAATTTCCTCATGATCATATCTGTCGATAATTATTCAATGATGCAACTTCTACATTCAGG
TATGACATCCAAACCGGCATTCAAGACCCTTATGAGGACTGCGTTGCCACAATGAGGCTTTACATGAGGATGAGGAATCAAGCT
CATAGGAGAGAAAACTATCCACTGGCTTCTGACCCTCAAAACCGAAACAACTTTGCATCATGGAGGCAAAGTGAGCTCGAGAG
GATGTCCCCAGAAGAAATGCTGGCTACCTCAAGGTCTGACTACTACTGTTGGTGTTTGGACTCTGAATGAGCATTGAACGCCAG
CATATATATGTGTAGTTCTCATGTGGTCAAACAGGTGTTCCATTCTGATTAAAGTTTAAGGATGCTA
SEQIDNO: 355
MASEPDPSESRTQRHKCPACYKQFKRKLHLIEHMKISYHSVHQPRCGVCQKHCKSFESVREHISGPLAKSNCSKIFLNQGCNLCLKV
LDSPAALNEHKQKCCLNAPVPLGTKIMPCIESHVILSGSIMDERHNGKGHGAIAIDCEMVGGGSDGSIDLCARVCLVDEDENLIFHTYV
QPQIPVSNYRYEVTGVTEDHLRDAMPLNEVQDKILKILYNGESVGRIRLDGEKVRLLVGHGIQHDLDCLRMKYPGQLLRDTAKYRPLM
KTNLLSHSLKHLTKTYLGYDIQSGIHDPYEDCISVMRLYKRMRGQDHQVEGLGNERANSGFDSIRSTELEKLTPDELYEISISDYKCWC
LDLSKECSLGS
SEQIDNO: 356
CTTTGGAAAATGCTTCACGCCAAAACAATAAACACCCCACGCCCATACACACCGGAAAATTCCCCGTCATTTTCATCTCCGGATC
TAGTACCCCATGGCCTCCGAACCTGATCCTTCAGAATCCCGAACCCAAAGGCACAAATGCCCTGCATGCTATAAACAATTTAAG
AGAAAGCTGCATCTTATAGAGCATATGAAAATCTCATACCATTCAGTTCATCAACCTAGATGCGGGGTGTGCCAAAAGCACTGC
AAATCTTTTGAATCAGTGCGAGAACATATTAGTGGTCCATTGGCAAAGTCAAATTGTTCGAAGATTTTTTTGAACCAAGGTTGTAA
TCTTTGTTTAAAAGTTCTGGATAGCCCTGCTGCCCTTAATGAACATAAACAAAAGTGCTGCCTAAATGCTCCTGTTCCCCTTGGA
ACAAAGATCATGCCTTGTATAGAATCTCATGTTATTTTGTCAGGTTCAATCATGGACGAAAGGCACAATGGTAAAGGTCATGGAG
CCATTGCTATTGATTGTGAAATGGTTGGTGGTGGTAGTGATGGATCAATTGACCTTTGTGCTAGGGTATGTCTTGTTGATGAAGA
TGAGAATCTAATTTTCCACACATATGTTCAACCACAAATTCCAGTCAGTAATTATAGATATGAAGTAACTGGGGTAACAGAAGAC
CATTTGAGAGATGCCATGCCACTTAACGAAGTGCAAGATAAAATATTGAAAATTCTGTACAACGGAGAGTCTGTTGGAAGGATTC
GCCTAGATGGGGAAAAGGTTAGGCTTCTTGTGGGTCATGGGATACAGCATGATTTGGACTGCTTGAGAATGAAATATCCTGGCC
AGCTGCTGAGGGACACTGCAAAATACCGTCCGTTGATGAAAACAAATCTTCTTAGTCACTCACTGAAGCACCTTACCAAAACATA
TCTAGGGTATGATATCCAGTCAGGCATTCACGATCCGTATGAAGATTGTATCTCTGTGATGAGACTGTACAAGAGAATGCGTGG
CCAAGACCATCAGGTGGAAGGACTTGGAAATGAAAGAGCAAATAGCGGCTTCGATTCTATTAGATCCACAGAACTAGAGAAGCT
GACTCCAGATGAGCTATATGAGATCTCTATATCTGATTACAAGTGTTGGTGTCTAGACTTGAGCAAGGAATGCAGCCTTGGCAG
CTGATTTTCCTTTTTTTTGTTTTTTTTCAACTGAACATTTAGTCTTGGCAGGGCATGTTAAGAAGCGTCTGCCATTGGTGCTTTGT
GTCCCCTAGTGTGGGCGTCATTTGGGCTTAAAACTTTTCGAATTTGACAGGAGAGCAGTAAAAAAAAGAGAGGATAGAGGAGAG
AAGTGAAAACAAGCAAGTCACAATAGAAAGTCAACTTGTAACTGCTTGGATTGTATATATAACAAGAGAAATTATGGGGACGGTT
GATGTTTTACTAGATAATGTGATTGTAGGAAATATAATCATTGAGAATAGAACATTGCAACATTTGTAAAGGTCAATTGCTG
SEQIDNO: 357
CTTTGGAAAATGCTTCACGCCAAAACAATAAACACCCCACGCCCATACACACCGGAAAATTCCCCGTCATTTTCATCTCCGGATC
TAGTACCCCATGGCCTCCGAACCTGATCCTTCAGAATCCCGAACCCAAAGGTCCCATGTCTCTCTTTCTCTATATTTATGCTTGT
GCTCTTTCTGATTGTTGGTCATTTATTGATGAGACATGTTTGGATGCCTAGAAAATATGGGAAAGAATACGGACGAAAATGCGTG
TCATTGGTTCATTTACTTTGTTTTTAGTTGATCAACTCCTGGGTACTAAAAAGATAGTAACAAATTTATTTGTTTCCTCGCAGTTTC
TCAGAATCTCTCTGCTTTCCCCTCTTACAGTTTTGTTTGTTTCCATATGAGGTTTTAGCTGATTTCAATAATTTTTCTGGGATATTA
AATGCTACTTTACGTTTTACTTAATTTTGATCACTTATGTTGTTGCTGTTTCAAGTTAGCGTCTGATCGATCACACTTTTACGTTTT
GCTCTTTTAGCAAAAAAAAAAAAAAAAAGAAAATTGAATATGAGGCACAATACAAATAGTAAAGGGTAAAATGTAAAAGTATCAAT
CAAACGAAGTCTTAGGACCAAGATTTGGTAGACATAGAGAATATACATCAGCTATCATAATGTAGGCAATTTGAGTTTAACTGTT
GAAGTATGATACTGTGAAATACGGGAAAAAATGGATATTGCTGAGAAGTTTCCACTTTTGCTGCTTCAGACATAAACTATGTGAT
AATAACTCTCTATTTAGATCTTTAAGCTGATATTGTCTTTGTTTTTCTTGATGATGATACATTGGTTGTGCTTGTAATGCATGTAAG
TGTAACGATCTTTTTTCCATTATTTTTGTTACAGGCACAAATGCCCTGCATGCTATAAACAATTTAAGAGAAAGCTGCATCTTATA
GAGCATATGAAAATCTCATACCATTCAGTTCATCAACCTAGATGCGGGGTGTGCCAAAAGCACTGCAAATCTTTTGAATCAGTGC
GAGAACATATTAGTGGTGAGATAATATGCATGTTCATTCTCATTTGTCAATTTTTATTGTGTAAGCATCTCATCTCTTTCCTTTTAC
ATAGGTCCATTGGCAAAGTCAAATTGTTCGAAGATTTTTTTGAACCAAGGTTGTAATCTTTGTTTAAAAGTTCTGGATAGCCCTGC
TGCCCTTAATGAACATAAACAAAAGTGCTGCCTAAATGCTCCTGTTCCCCTTGTAAGTAGCCCAGTGAAACTATTAAAATGCTAA
AATAGAATCTTATCAATGATGGAGCTTTCCCCCCTCCGCCCTTCTTTATTTATCTATAACAATATGTTATATATGCCCTTTGGACA
CATGTTTTACTATATTTCTCTTGTATTTTGTGTTTTGGATGCCTTATTTGTAAGTTATATGATAAAATGAATCATGAAAACAAGGAA
AAAGTACATTTTGGTTAAAGTTGAGTAACTGGTGCATAGTGACCTTTCTAATCACATTCATACTGCAGAATAACTTGTTTTGGGTC
GTTATTTAATTCATTGCCAAATATAACCTAAATATTATGTTGACTGTTGCAGGGAACAAAGATCATGCCTTGTATAGAATCTCATG
TTATTTTGTCAGGTTCAATCATGGACGAAAGGCACAATGGTAAAGGTCATGGAGCCATTGCTATTGATTGTGAAATGGTTGGTG
GTGGTAGTGATGGATCAATTGACCTTTGTGCTAGGGTATGTCTTGTTGATGAAGATGAGAATCTAATTTTCCACACATATGTTCA
ACCACAAATTCCAGTCAGTAATTATAGGTACCATGCTCCGTATTTTATTTTATTTAATAAGGTCATTTTAAAGGAATAGTTCCTTTA
TCTCCATATATATGTTTCAGATATGAAGTAACTGGGGTAACAGAAGACCATTTGAGAGATGCCATGCCACTTAACGAAGTGCAAG
ATAAAATATTGAAAATTCTGTACAACGGAGAGTCTGTTGGAAGGATTCGCCTAGATGGGGAAAAGGTTAGGCTTCTTGTGGGTC
ATGGGATACAGCATGATTTGGACTGCTTGAGAATGAAATATCCTGGCCAGCTGCTGAGGTATATTGAACTATTTCTATCGCTGTA
AACACAGCAACCCATCTAAATTTCTTCTTGAGGAATCAGTTTGTTGAAGCTGCTGTCTGTAATTTTATTGGAACCCTATGTGATGT
CATTTCTTGTGTTTCCTCACTCATTCGATGGTATAACTTAGTTCACTTCTAGATGAAATATATCCAAGATATAACTACTTTAAGCGT
TAACAAAATTAACTCGTTCTGTTGTGTTTTGCATCTCATTTAATCCTATACTTTGTTTATTAATCACTTTTTAACTCTATCTAAGGAC
TTAATTGGCTTTGTAAGGAAAGGATGCATTGCATTGTCTAGTCAAACAGAGTGGAAAAATAAAGTGTAGAAGAATTGGGATGATT
TTAGATTGTCCTGCTGTTTTCACTTTCTGATTTGACATGGACTTCTTTCGACAACCCCTCCCCCCTTCCTGCCCTTTTTCTTCATT
TCTTTTTTCTTATTAAAGATGTTGTGCAGAAATGTCCTCCCTTACATGGGCTTTTCTATTGTGCAGGGACACTGCAAAATACCGTC
CGTTGATGAAAACAAATCTTCTTAGTCACTCACTGAAGCACCTTACCAAAACATATCTAGGGTAAGCTACTATTTCAGGATCTATT
ACACATTTTGGAGTTATTTCTTGCTCATTAAATTTGCTGCTGCTGCTCACTGTATCTTCTTTCTTGTTACACCCTTTTCCTCTAGCA
TCAACGTGCATTGTTTTACAGGTATGATATCCAGTCAGGCATTCACGATCCGTATGAAGATTGTATCTCTGTGATGAGACTGTAC
AAGAGAATGCGTGGCCAAGACCATCAGGTGGAAGGACTTGGAAATGAAAGAGCAAATAGCGGCTTCGATTCTATTAGATCCAC
AGAACTAGAGAAGCTGACTCCAGATGAGCTATATGAGATCTCTATATCTGATTACAAGTGTTGGTGTCTAGACTTGAGCAAGGAA
TGCAGCCTTGGCAGCTGATTTTCCTTTTTTTTGTTTTTTTTCAACTGAACATTTAGTCTTGGCAGGGCATGTTAAGAAGCGTCTGC
CATTGGTGCTTTGTGTCCCCTAGTGTGGGCGTCATTTGGGCTTAAAACTTTTCGAATTTGACAGGAGAGCAGTAAAAAAAAGAG
AGGATAGAGGAGAGAAGTGAAAACAAGCAAGTCACAATAGAAAGTCAACTTGTAACTGCTTGGATTGTATATATAACAAGAGAAA
TTATGGGGACGGTTGATGTTTTACTAGATAATGTGATTGTAGGAAATATAATCATTGAGAATAGAACATTGCAACATTTGTAAAGG
TCAATTGCTG
SEQIDNO: 358
MGSRHESSETLRNKCAACYRQFNKMEHLVEHMRTSYHSVHEPMCGICRKHCRSFESLREHLIGPLPKAECERIFKDRGCDLCLTVLS
SRSGLWNHREACQFSRSNNGVLCRLANLGIQDELRLDNSRAKVVALACKMVGGGSDGSLDLCARVCLIDEHERIIFHTYVKPQLPVT
NYRYETTGLRPEFLREAMPLKQVQRRIQDYLCNGEPIWHIRSRGGRARVLVGHGLDHDLKCLEMEDTAKYPPLMKTSKLSNSLKYLT
KAYLGYDIQTGQQDPYEDCVATLRLYMRMRSQNHDTEDCPLATDPQNRNNFASWRQNELERMTPEKLLEISRSDYYCWCLDSRTS
HTNS
SEQIDNO: 359
ATGGGCAGCAGGCACGAGTCTTCCGAGACTCTGAGGAACAAATGCGCTGCATGCTATAGGCAGTTCAACAAAATGGAACACCT
TGTGGAACACATGAGGACATCCTATCATTCGGTTCATGAACCCATGTGCGGGATTTGCAGGAAACATTGTCGATCATTTGAATCT
CTGAGAGAACATCTTATAGGGCCGCTCCCGAAAGCAGAATGTGAGAGGATTTTCAAGGACCGGGGATGTGACCTTTGCCTAAC
AGTCCTGAGCAGTCGCAGTGGGCTCTGGAATCACCGGGAAGCATGCCAATTCTCACGTTCGAACAATGGGGTTCTGTGTCGTC
TGGCAAATTTGGGCATACAAGATGAATTAAGGCTGGACAACAGTAGAGCGAAGGTGGTCGCCCTGGCTTGCAAAATGGTTGGA
GGCGGTAGCGATGGCTCTTTAGATCTGTGTGCAAGAGTTTGCCTCATCGATGAGCACGAAAGGATAATCTTTCATACATATGTC
AAGCCACAGCTTCCCGTCACAAACTACAGGTATGAAACAACGGGATTGCGACCAGAATTTCTAAGGGAAGCGATGCCGTTGAA
ACAAGTGCAGAGAAGGATTCAGGACTATTTATGCAACGGGGAACCAATATGGCACATACGTTCTAGAGGAGGAAGAGCTCGCG
TCCTTGTGGGACATGGTTTGGATCACGATCTCAAGTGTTTGGAAATGGAGGACACGGCCAAATATCCACCACTTATGAAAACCA
GCAAGCTTAGCAACTCGCTCAAGTATTTGACAAAAGCATACCTTGGCTATGACATTCAAACGGGCCAGCAAGATCCGTATGAAG
ACTGCGTTGCTACACTGAGGCTCTACATGAGAATGAGATCACAGAATCACGATACGGAGGACTGCCCTCTTGCTACCGACCCC
CAGAACCGCAACAATTTTGCATCATGGCGACAGAACGAGCTCGAGAGGATGACTCCTGAAAAATTGCTAGAGATCTCAAGGTCT
GACTATTATTGCTGGTGCTTGGACTCCAGAACCAGCCACACCAATTCCTGA
SEQIDNO: 360
ATGGGCAGCAGGCACGAGTCTTCCGAGACTCTGAGGTAAAATCTCTACCGTGCTATTGAATACTTGTTTTATTTATTGTTACCTC
CTGATCAAGATGAAAAGGTTCATGTTGTGCATGAAAAAGAGAGAGGCAATAATTTAGCGTTTCATGATGATGCTGTCTATAATGT
CTCAGGAACAAATGCGCTGCATGCTATAGGCAGTTCAACAAAATGGAACACCTTGTGGAACACATGAGGACATCCTATCATTCG
GTTCATGAACCCATGTGCGGGATTTGCAGGAAACATTGTCGATCATTTGAATCTCTGAGAGAACATCTTATAGGTTAATTAAATC
ATTTCTGTCCTAGCGAACACAGTAATTATTCAACCATTTTCGGCTCTCTGCCTTTTCCATTTGATCTGATGTGGTTGGTTGGTTCT
GACACATGCGGGATTGAATTGCAAAACCAGGGCCGCTCCCGAAAGCAGAATGTGAGAGGATTTTCAAGGACCGGGGATGTGA
CCTTTGCCTAACAGTCCTGAGCAGTCGCAGTGGGCTCTGGAATCACCGGGAAGCATGCCAATTCTCACGTTCGAACAATGTAT
GGAACGACAGTTAAACTCAGCTATATGTTCGCATTTCCATTCCACGACAAATAGTAAAACTTTTTTGTTTTTGTAGGGGGTTCTGT
GTCGTCTGGCAAATTTGGGCATACAAGATGAATTAAGGCTGGACAACAGTAGAGCGAAGGTGGTCGCCCTGGCTTGCAAAATG
GTTGGAGGCGGTAGCGATGGCTCTTTAGATCTGTGTGCAAGAGTTTGCCTCATCGATGAGCACGAAAGGATAATCTTTCATACA
TATGTCAAGCCACAGCTTCCCGTCACAAACTACAGGTAATGGCGCAACAAAAAGATCATCAAAATTCACATACTACACAGGCAC
ATAGACAGTGAATTTGCACTCTAGAGACGGACTTTGAAAAATTCTTCCGCAGGTATGAAACAACGGGATTGCGACCAGAATTTCT
AAGGGAAGCGATGCCGTTGAAACAAGTGCAGAGAAGGATTCAGGACTATTTATGCAACGGGGAACCAATATGGCACATACGTT
CTAGAGGAGGAAGAGCTCGCGTCCTTGTGGGACATGGTTTGGATCACGATCTCAAGTGTTTGGAAATGGAGTATCCACCGATA
ATGATCAGGCAAGTTAGCTAGTTACGGGGCCACCCACCAATTATATATATATATACACACTTTGCTGCAGGAACACCAATTTTGA
CACCTGTGAAACTCCTTTTTTTTCCTGAAAAAAAAAATTTTTTGGCAGGGACACGGCCAAATATCCACCACTTATGAAAACCAGC
AAGCTTAGCAACTCGCTCAAGTATTTGACAAAAGCATACCTTGGGTATGTAGCTTCATTAAACTCTGGATGTTAGTAGTACATTA
CATCAAGAATAACAACATCATGTTTTTTTCTTTTTGGGGGTGGCGGCGGTGGGCAGCTATGACATTCAAACGGGCCAGCAAGAT
CCGTATGAAGACTGCGTTGCTACACTGAGGCTCTACATGAGAATGAGATCACAGAATCACGATACGGAGGACTGCCCTCTTGCT
ACCGACCCCCAGAACCGCAACAATTTTGCATCATGGCGACAGAACGAGCTCGAGAGGATGACTCCTGAAAAATTGCTAGAGAT
CTCAAGGTCTGACTATTATTGCTGGTGCTTGGACTCCAGAACCAGCCACACCAATTCCTGA
SEQIDNO: 361
MEHLVEHMRTSYHSVHEPMCGICRKHCRSFESLREHLIGPLPKAECERIFKDRGCDLCLTVLSSRSALWNHREACQFSRSNNGVLC
RLANLGIQDELRLDNSRAKVVALACKMVGGGSDGSLDLCARICLIDEHERIIFHAYVKPQLPVTNYRYETTGLRPEFLREAMPLKQVQR
RIQDYLCNGEPIWHIRSRGGRARVLVGHGLDHDLKCLEMEDTAKYPPLMKTSKLSNSLKYLTKAYLGYDIQTGQQDPYEDCVATLRL
YMRMRSQNHDTEDCPLATDPQNRNNFASWRQNELERMTPEKLLEISRSDYYCWCLDSRTSHTNS
SEQIDNO: 362
ATGGAACACCTTGTGGAACACATGAGGACATCCTATCATTCGGTTCATGAACCCATGTGCGGAATTTGCAGGAAACATTGTCGA
TCATTTGAATCTCTGAGAGAACATCTTATAGGGCCGCTCCCGAAAGCAGAATGTGAGAGGATTTTCAAGGACCGGGGATGTGAC
CTTTGCTTAACAGTCCTGAGCAGTCGCAGTGCGCTCTGGAATCACCGGGAAGCATGCCAATTCTCACGTTCGAACAATGGGGT
TCTGTGTCGTCTGGCAAATTTGGGCATACAAGATGAATTAAGGCTGGACAACAGTAGAGCGAAGGTGGTCGCCCTGGCTTGCA
AAATGGTTGGAGGCGGTAGCGATGGTTCTTTAGATCTGTGTGCAAGAATTTGCCTCATCGATGAGCACGAAAGGATAATCTTTC
ATGCATATGTCAAGCCACAGCTTCCCGTCACAAACTACAGGTATGAAACAACGGGATTGCGACCAGAATTTCTAAGGGAAGCGA
TGCCGTTGAAACAAGTGCAGAGAAGGATTCAGGACTATTTATGCAACGGGGAACCAATATGGCACATCCGTTCTAGAGGAGGA
AGAGCTCGCGTCCTTGTGGGACATGGTTTGGATCACGATCTTAAGTGTTTGGAAATGGAGGACACGGCCAAATATCCACCACTT
ATGAAAACCAGCAAGCTTAGCAACTCGCTCAAGTATTTGACAAAAGCATACCTTGGCTATGACATTCAAACGGGCCAGCAAGAT
CCGTATGAAGACTGCGTTGCTACACTGAGGCTCTACATGAGAATGAGATCACAGAATCACGATACGGAGGACTGCCCTCTTGCT
ACCGACCCCCAGAACCGCAACAATTTTGCGTCATGGCGACAGAACGAGCTCGAGAGGATGACTCCTGAAAAATTGCTAGAGAT
CTCAAGGTCTGACTATTATTGCTGGTGCTTGGACTCCAGAACCAGCCACACCAATTCTTGA
SEQIDNO: 363
ATGGAACACCTTGTGGAACACATGAGGACATCCTATCATTCGGTTCATGAACCCATGTGCGGAATTTGCAGGAAACATTGTCGA
TCATTTGAATCTCTGAGAGAACATCTTATAGGTTAATTAAATCATTTCTGTCCTAGCCAACACAGTAATTATTCAACCATTTTCGGC
TCTCTGCCTTTTCCATTTGATCTGATGTGGTTGGTTCTGACACATGCGGGATTGAATTGCAAAACCAGGGCCGCTCCCGAAAGC
AGAATGTGAGAGGATTTTCAAGGACCGGGGATGTGACCTTTGCTTAACAGTCCTGAGCAGTCGCAGTGCGCTCTGGAATCACC
GGGAAGCATGCCAATTCTCACGTTCGAACAATGTATGGAACGACAATTAAACTCAGGTGTATATTCGCATTTCCATTCCACGACA
AATAGTAAAACTTTTTTGTTTTTTGTACGTAGGGGGTTCTGTGTCGTCTGGCAAATTTGGGCATACAAGATGAATTAAGGCTGGA
CAACAGTAGAGCGAAGGTGGTCGCCCTGGCTTGCAAAATGGTTGGAGGCGGTAGCGATGGTTCTTTAGATCTGTGTGCAAGAA
TTTGCCTCATCGATGAGCACGAAAGGATAATCTTTCATGCATATGTCAAGCCACAGCTTCCCGTCACAAACTACAGGTAATGGA
GCAACAAAAAGATCGTCAAAATTCACATACTACATAGGCACATAGAAAGTGAATTTGCACTCTAGCTAGAGACGGACTTTGAAAA
ATTCTTCTGCAGGTATGAAACAACGGGATTGCGACCAGAATTTCTAAGGGAAGCGATGCCGTTGAAACAAGTGCAGAGAAGGAT
TCAGGACTATTTATGCAACGGGGAACCAATATGGCACATCCGTTCTAGAGGAGGAAGAGCTCGCGTCCTTGTGGGACATGGTT
TGGATCACGATCTTAAGTGTTTGGAAATGGAGTATCCACCGATAATGATCAGGCAAGTTAGCTAGTTACGGGGCCGCCCACCAA
TTATATATATATACTTTGCTGCAGGAACACCAATTTTGACGCCTATGAAACTCCTTTTTTTTTTCTGAAAAAAAATTTTTTTGGCAG
GGACACGGCCAAATATCCACCACTTATGAAAACCAGCAAGCTTAGCAACTCGCTCAAGTATTTGACAAAAGCATACCTTGGGTA
AGTAGCTTAATTAAAGTCTGGATGTTAGTAGTACATTACATCAAGAATAACAACATCATGATTTTTTTTTTATTTTTTTTTTGGGGA
CTCTGCTAAGGAAAATGTTTTTTTCTTTTTGGTGGTGGTGGTGGGCAGCTATGACATTCAAACGGGCCAGCAAGATCCGTATGA
AGACTGCGTTGCTACACTGAGGCTCTACATGAGAATGAGATCACAGAATCACGATACGGAGGACTGCCCTCTTGCTACCGACC
CCCAGAACCGCAACAATTTTGCGTCATGGCGACAGAACGAGCTCGAGAGGATGACTCCTGAAAAATTGCTAGAGATCTCAAGG
TCTGACTATTATTGCTGGTGCTTGGACTCCAGAACCAGCCACACCAATTCTTGA
SEQIDNO: 364
MEHLVEHMRTSYHSVHEPMCGICRKHCRSFESLREHLIGPLPKAECERIFKDRGCDLCLTVLSSRSALWNHREACQFSRSNNGVLC
RLANLGIQDELRLDNSRAKVVALACKMVGGGSDGSLDLCARICLIDEHERIIFHAYVKPQLPVTNYRYETTGLRPEFLREAMPLKQVQR
RIQDYLCNGEPIWHIRSRGGRARVLVGHGLDHDLKCLEMEDTAKYPPLMKTSKLSNSLKYLTKAYLGYDIQTGQQDPYEDCVATLRL
YMRMRSQNHDTEDCPLATDPQNRNNFASWRQNELERMTPEKLLEISRSDYYCWCLDSRTSHTNS
SEQIDNO: 365
ATGGAACACCTTGTGGAACACATGAGGACATCCTATCATTCGGTTCATGAACCCATGTGCGGAATTTGCAGGAAACATTGTCGA
TCATTTGAATCTCTGAGAGAACATCTTATAGGGCCGCTCCCGAAAGCAGAATGTGAGAGGATTTTCAAGGACCGGGGATGTGAC
CTTTGCTTAACAGTCCTGAGCAGTCGCAGTGCGCTCTGGAATCACCGGGAAGCATGCCAATTCTCACGTTCGAACAATGGGGT
TCTGTGTCGTCTGGCAAATTTGGGCATACAAGATGAATTAAGGCTGGACAACAGTAGAGCGAAGGTGGTCGCCCTGGCTTGCA
AAATGGTTGGAGGCGGTAGCGATGGTTCTTTAGATCTGTGTGCAAGAATTTGCCTCATCGATGAGCACGAAAGGATAATCTTTC
ATGCATATGTCAAGCCACAGCTTCCCGTCACAAACTACAGGTATGAAACAACGGGATTGCGACCAGAATTTCTAAGGGAAGCGA
TGCCGTTGAAACAAGTGCAGAGAAGGATTCAGGACTATTTATGCAACGGGGAACCAATATGGCACATCCGTTCTAGAGGAGGA
AGAGCTCGCGTCCTTGTGGGACATGGTTTGGATCACGATCTTAAGTGTTTGGAAATGGAGGACACGGCCAAATATCCACCACTT
ATGAAAACCAGCAAGCTTAGCAACTCGCTCAAGTATTTGACAAAAGCATACCTTGGCTATGACATTCAAACGGGCCAGCAAGAT
CCGTATGAAGACTGCGTTGCTACACTGAGGCTCTACATGAGAATGAGATCACAGAATCACGATACGGAGGACTGCCCTCTTGCT
ACCGACCCCCAGAACCGCAACAATTTTGCGTCATGGCGACAGAACGAGCTCGAGAGGATGACTCCTGAAAAATTGCTAGAGAT
CTCAAGGTCTGACTATTATTGCTGGTGCTTGGACTCCAGAACCAGCCACACCAATTCTTGA
SEQIDNO: 366
ATGGAACACCTTGTGGAACACATGAGGACATCCTATCATTCGGTTCATGAACCCATGTGCGGAATTTGCAGGAAACATTGTCGA
TCATTTGAATCTCTGAGAGAACATCTTATAGGTTAATTAAATCATTTCTGTCCTAGCCAACACAGTAATTATTCAACCATTTTCGGC
TCTCTGCCTTTTCCATTTGATCTGATGTGGTTGGTTCTGACACATGCGGGATTGAATTGCAAAACCAGGGCCGCTCCCGAAAGC
AGAATGTGAGAGGATTTTCAAGGACCGGGGATGTGACCTTTGCTTAACAGTCCTGAGCAGTCGCAGTGCGCTCTGGAATCACC
GGGAAGCATGCCAATTCTCACGTTCGAACAATGTATGGAACGACAATTAAACTCAGTGTATATTCGCATTTCCATTCCACGACAA
ATAGTAAAACTTTTTTGTTTTTTGTACGTAGGGGGTTCTGTGTCGTCTGGCAAATTTGGGCATACAAGATGAATTAAGGCTGGAC
AACAGTAGAGCGAAGGTGGTCGCCCTGGCTTGCAAAATGGTTGGAGGCGGTAGCGATGGTTCTTTAGATCTGTGTGCAAGAAT
TTGCCTCATCGATGAGCACGAAAGGATAATCTTTCATGCATATGTCAAGCCACAGCTTCCCGTCACAAACTACAGGTAATGGAG
CAACAAAAAGATCGTCAAAATTCACATACTACATAGGCACATAGAAAGTGAATTTGCACTCTAGCTAGAGACGGACTTTGAAAAA
TTCTTCTGCAGGTATGAAACAACGGGATTGCGACCAGAATTTCTAAGGGAAGCGATGCCGTTGAAACAAGTGCAGAGAAGGATT
CAGGACTATTTATGCAACGGGGAACCAATATGGCACATCCGTTCTAGAGGAGGAAGAGCTCGCGTCCTTGTGGGACATGGTTT
GGATCACGATCTTAAGTGTTTGGAAATGGAGTATCCACCGATAATGATCAGGCAAGTTAGCTAGTTACGGGGCCGCCCACCAAT
TATATATATATACTTTGCTGCAGGAACACCAATTTTGACGCCTATGAAACTCCTTTTTTTTTTCTGAAAAAAAATTTTTTTGGCAGG
GACACGGCCAAATATCCACCACTTATGAAAACCAGCAAGCTTAGCAACTCGCTCAAGTATTTGACAAAAGCATACCTTGGGTAA
GTAGCTTAATTAAAGTCTGGATGTTAGTAGTACATTACATCAAGAATAACAACATCATGATTTTTTTTTTATTTTTTTTTGGGGACT
CTGCTAAGGAAAATGTTTTTTCTTTTTGGTGGTGGTGGTGGGCAGCTATGACATTCAAACGGGCCAGCAAGATCCGTATGAAGA
CTGCGTTGCTACACTGAGGCTCTACATGAGAATGAGATCACAGAATCACGATACGGAGGACTGCCCTCTTGCTACCGACCCCC
AGAACCGCAACAATTTTGCGTCATGGCGACAGAACGAGCTCGAGAGGATGACTCCTGAAAAATTGCTAGAGATCTCAAGGTCT
GACTATTATTGCTGGTGCTTGGACTCCAGAACCAGCCACACCAATTCTTGA
SEQIDNO: 367
MESSDTLRNKCAACYRQFNKMEHLVEHMRTSYHSVHEPTCGICKKHCRSFESLREHLIGPLPKAECERIFKERGCDLCLTTLSSRNA
LRVHRETCQLSRPSPGLLYRMANLGIYDDLKIDNSRTKVAALACKMVGGGSDGTLDLCARVSLIDEYENIIFHTYVKPHLPVTNYRYET
TGVRPEFLRDAIPLRQASRKIQDFLCNGEPLWKIRSRGGKATILIGHGLDHDLKCLEVEYPAIMIRDTAKYPPLMKTSKLSNSLKYLTKA
YLGYDIQTGIQDPYDDCVATMRLYMRMRSQVHKLEDYPLATDPQNRNNFAQWRQSELERMNPEEMLEISRSDFYCWCLDSKESF
SEQIDNO: 368
AGATACTCCAAAGGTCAGTCTTCTTATCTCTCAAGTAGGGCTCTGATTCACTAGCTACTTTAGTGGACAACGGAATGGAGTCTTC
AGACACTCTTCGGAACAAGTGCGCAGCATGCTATAGACAGTTCAACAAAATGGAGCATCTAGTGGAACACATGAGGACATCTTA
TCACTCAGTTCATGAACCCACATGTGGAATTTGCAAGAAACATTGCCGATCATTTGAATCTCTGAGGGAGCATCTCATAGGGCC
ATTGCCAAAGGCAGAATGTGAAAGGATATTCAAAGAACGAGGATGCGACCTTTGCTTAACCACCCTTAGCAGCCGAAATGCTCT
TAGGGTCCACCGAGAGACATGCCAACTCTCACGTCCGAGCCCTGGCCTACTTTATCGCATGGCTAACTTAGGCATCTATGATGA
CTTGAAGATTGACAACAGTAGAACAAAGGTTGCTGCACTTGCTTGCAAAATGGTTGGTGGTGGCAGTGATGGCACCTTAGATCT
TTGTGCAAGGGTTTCCCTAATTGATGAATATGAGAACATCATCTTTCACACCTATGTCAAGCCTCATCTTCCTGTCACGAACTATA
GGTATGAGACAACAGGCGTACGACCAGAATTCTTAAGAGATGCAATACCACTGAGGCAAGCATCAAGGAAGATCCAAGATTTTT
TATGCAATGGTGAACCATTATGGAAAATCCGATCTAGAGGTGGAAAAGCAACAATTCTCATAGGTCATGGCTTGGATCACGATC
TTAAATGCTTAGAAGTGGAGTACCCAGCAATAATGATCAGGGACACAGCGAAATATCCTCCACTGATGAAAACAAGCAAACTCA
GCAACTCTCTGAAGTACCTAACAAAAGCATACCTCGGGTATGACATTCAAACTGGTATACAAGATCCTTATGATGACTGTGTAGC
TACAATGAGGCTTTACATGAGAATGAGGTCCCAAGTTCATAAACTGGAGGACTACCCACTTGCTACTGACCCACAGAACCGTAA
CAATTTTGCACAATGGAGGCAAAGCGAACTTGAGAGAATGAATCCAGAGGAAATGTTGGAAATCTCAAGGTCTGATTTCTATTGT
TGGTGCTCGGACTCTAAAGAAAGTTTCTGAATATTGAAGAAGGCTAACATGTTCTAGGAGGCAGACATAAAATAGTGAGTCTAAA
ACTCCACGAGTGAGCAAACCTATAATTATGAAACAATAAACATGGAAATGTAGCTCATTTCCATTATGTATTAACTATGCGAAACA
AAATCCATGTACCTTGTTGTGATATTGTATGTGACTTTATAATGAATAATTTACCTTCACTTACTGAAG
SEQIDNO: 369
MTSVTRNKCAACYRQFNKMEHLVEHMRTSYHSVHEPTCGICKKHCRSFESLREHLIGPLPKAECERIFKERGCDLCLTTLSSRNALR
VHRETCQLSRPSPGLLYRMANLGIYDDLKIDNSRTKVVALACKMVGGGSDGTLDLCARVSLIDEYENIIFHTYVKPHLPVTNYRYETTG
VRPEFLRDAIPLRQASRKIQDFLCNGEPLWKIRSRGGKATILIGHGLDHDLKCLEVEYPAIMIRDTAKYPPLMKTSKLSNSLKYLTKAYL
GYDIQTGIQDPYDDCVATMRLYMRMRSQVHKLEDYPLATDPQNRNNFAQWRQSELERMNPEEMLEISRSDFYCWCSDSKESF
SEQIDNO: 370
ATGACTTCTGTAACCAGGAACAAGTGCGCAGCATGCTATAGACAGTTCAACAAAATGGAGCATCTAGTGGAACACATGAGGACA
TCTTATCACTCAGTTCATGAACCCACATGTGGAATTTGCAAGAAACATTGCCGATCATTTGAATCTCTGAGGGAGCATCTCATAG
GGCCATTGCCAAAGGCAGAATGTGAAAGGATATTCAAAGAACGAGGATGTGACCTTTGCTTAACCACCCTTAGCAGCCGAAATG
CTCTTAGGGTCCACCGAGAGACATGCCAACTCTCACGTCCGAGCCCTGGCCTACTTTATCGCATGGCTAACTTAGGCATCTATG
ATGACTTGAAGATTGACAACAGTAGAACAAAGGTTGTTGCACTTGCTTGCAAAATGGTTGGTGGTGGCAGTGATGGCACCTTAG
ATCTTTGTGCAAGGGTTTCCCTAATTGATGAATATGAGAACATCATCTTTCACACCTATGTCAAGCCTCATCTTCCTGTCACGAAC
TATAGGTATGAGACAACAGGCGTACGACCAGAATTCTTAAGAGATGCTATACCACTGAGGCAAGCATCAAGGAAGATCCAAGAT
TTTTTATGCAATGGTGAACCATTATGGAAAATCCGATCTAGAGGTGGAAAAGCAACAATTCTCATAGGTCATGGCTTGGATCACG
ATCTTAAATGCTTAGAAGTGGAGTACCCAGCAATAATGATCAGGGACACAGCGAAATATCCTCCACTGATGAAAACAAGCAAAC
TCAGCAACTCTCTGAAGTACCTAACAAAAGCATACCTCGGGTATGACATTCAAACTGGTATACAAGATCCTTATGATGACTGTGT
AGCTACAATGAGGCTTTACATGAGAATGAGGTCCCAAGTTCATAAACTGGAGGACTACCCACTTGCTACTGACCCACAGAACCG
TAACAATTTTGCACAATGGAGGCAAAGCGAACTTGAGAGAATGAATCCAGAGGAAATGTTGGAAATCTCAAGGTCTGATTTCTAT
TGTTGGTGCTCGGACTCTAAAGAAAGTTTCTGA
SEQIDNO: 371
ATGACTTCTGTAACCAGGAACAAGTGCGCAGCATGCTATAGACAGTTCAACAAAATGGAGCATCTAGTGGAACACATGAGGACA
TCTTATCACTCAGTTCATGAACCCACATGTGGAATTTGCAAGAAACATTGCCGATCATTTGAATCTCTGAGGGAGCATCTCATAG
GTAAACTTTTAATTCACAACCAGAGCTCTGCTGATATTTTTCTTCATAAAATTGATCTTGATTACAATGTTACTCATTTGCTTCTTC
AGGGCCATTGCCAAAGGCAGAATGTGAAAGGATATTCAAAGAACGAGGATGTGACCTTTGCTTAACCACCCTTAGCAGCCGAAA
TGCTCTTAGGGTCCACCGAGAGACATGCCAACTCTCACGTCCGAGCCCTGTAAAAATCCTCATACTTGCTATTGAGGCACAAAA
TACCCCCTTTTTTTTTCCTTCCTTTTCATTTTCCATAGTGATTCTAAAACCCACAACCTATTTTGATTTTTTCAGGGCCTACTTTATC
GCATGGCTAACTTAGGCATCTATGATGACTTGAAGATTGACAACAGTAGAACAAAGGTTGTTGCACTTGCTTGCAAAATGGTTG
GTGGTGGCAGTGATGGCACCTTAGATCTTTGTGCAAGGGTTTCCCTAATTGATGAATATGAGAACATCATCTTTCACACCTATGT
CAAGCCTCATCTTCCTGTCACGAACTATAGGTACTAATGAGTTTATATTGAGATTCCCAAGTAACTGCTGCTTACTAAATACCATA
CTCTAATCAAGGGTTAATTTTACTTAGGTATGAGACAACAGGCGTACGACCAGAATTCTTAAGAGATGCTATACCACTGAGGCAA
GCATCAAGGAAGATCCAAGATTTTTTATGCAATGGTGAACCATTATGGAAAATCCGATCTAGAGGTGGAAAAGCAACAATTCTCA
TAGGTCATGGCTTGGATCACGATCTTAAATGCTTAGAAGTGGAGTACCCAGCAATAATGATCAGGTAAGCTGAGTAAGGAAGCT
CGTGAGTCCTGACATCCAAGATTTCAAGCCATCAGCAGTCCAGTTTTTTAATAGCTATTTGGCATCACTTCGTATTCTATACAATT
GAAAGAATTGGACTGTAAAGATATAAACTCATTGCTACAGCCCCATGTTCAAGACTTAAATTAAAATTCAACGATTTTTTCTTTTCT
TTTTTTCTACAGGGACACAGCGAAATATCCTCCACTGATGAAAACAAGCAAACTCAGCAACTCTCTGAAGTACCTAACAAAAGCA
TACCTCGGGTAATTACCCTTCATGCACTATGATCCTACAGTCAAAAAATTATTAATATAGGTCTTTCAAGTAGTAACGAAAATTCT
GTTTTACAGGTATGACATTCAAACTGGTATACAAGATCCTTATGATGACTGTGTAGCTACAATGAGGCTTTACATGAGAATGAGG
TCCCAAGTTCATAAACTGGAGGACTACCCACTTGCTACTGACCCACAGAACCGTAACAATTTTGCACAATGGAGGCAAAGCGAA
CTTGAGAGAATGAATCCAGAGGAAATGTTGGAAATCTCAAGGTCTGATTTCTATTGTTGGTGCTCGGACTCTAAAGAAAGTTTCT
GA
SEQIDNO: 372
MEHLVEHMRTSYHSAHEPMCGICRKHCRSFESLREHLIGPLPKVECERIFKEQGCDLCLTIFSSRNALHVHREACQFSRGNNMGLTN
RMANLGIQDDLKMDSSRARVVALACKMVGGGSDGSLDLCARVCLIDESEKIIFHTYVKPRLPVTKYRYETTGMRPEFLRDAMPLRQV
QRKIQDYLCNGEPIWQIRSRAGKARILVGHGLDHDLKSLEVEDTADYPPLMKSSKLSNSLKYLTKTYLGYDIQTGIQDPYEDCVATMRL
YMRMRSQRHKVEDYPLAQDPQNRNNFAAFRQSELERMAPEKMLEISRSDYYCWCLDSSS
SEQIDNO: 373
ATGGAGCATTTAGTCGAACACATGAGGACGTCGTACCATTCAGCTCATGAGCCCATGTGTGGAATTTGTAGAAAGCATTGCCGA
TCGTTTGAGTCTCTACGGGAGCATCTTATAGGACCTTTACCAAAGGTTGAATGTGAAAGGATATTTAAGGAACAAGGATGTGATC
TTTGTTTAACCATCTTTAGTAGCCGTAACGCTCTCCATGTCCACCGAGAGGCATGCCAATTCTCACGTGGCAACAATATGGGTCT
GACAAATCGAATGGCAAACTTGGGCATCCAGGATGATTTGAAGATGGATAGTAGTAGAGCAAGAGTGGTTGCACTTGCTTGCAA
AATGGTAGGAGGTGGTAGTGATGGTTCCTTAGATCTTTGTGCAAGGGTTTGCCTCATCGATGAATCCGAAAAGATAATCTTTCAT
ACATATGTGAAGCCACGTCTTCCGGTCACGAAATATAGGTATGAAACAACAGGCATGAGACCAGAATTTTTACGGGATGCTATG
CCACTTAGGCAAGTGCAAAGAAAGATTCAAGATTACTTATGTAATGGGGAGCCCATATGGCAGATCCGCTCCAGAGCTGGAAAA
GCTAGGATCCTTGTAGGCCATGGATTAGATCATGATTTGAAAAGCCTTGAAGTAGAGGATACCGCAGATTACCCTCCACTGATG
AAATCAAGCAAGCTCAGCAACTCACTTAAATATCTAACGAAAACATACCTTGGATATGACATTCAAACTGGTATTCAAGATCCCTA
TGAAGACTGTGTTGCAACAATGAGGCTGTACATGAGAATGAGATCACAGCGTCATAAAGTGGAAGACTATCCGCTTGCTCAAGA
CCCACAAAATCGAAACAATTTTGCTGCATTTAGGCAAAGCGAGCTTGAGAGGATGGCTCCAGAAAAGATGCTGGAAATCTCAAG
GTCTGATTACTATTGCTGGTGCTTAGACTCTAGCAGCTAA
SEQIDNO: 374
ATGGAGCATTTAGTCGAACACATGAGGACGTCGTACCATTCAGCTCATGAGCCCATGTGTGGAATTTGTAGAAAGCATTGCCGA
TCGTTTGAGTCTCTACGGGAGCATCTTATAGGTATTCTTCAATCTCCTAGAAGCTATAACATGTTATGTGTCATTTAAGATTTGGC
TTCTAACGCGTGTTGATTTCCTATACAGGACCTTTACCAAAGGTTGAATGTGAAAGGATATTTAAGGAACAAGGATGTGATCTTT
GTTTAACCATCTTTAGTAGCCGTAACGCTCTCCATGTCCACCGAGAGGCATGCCAATTCTCACGTGGCAACAATATGGTAAAGA
TGCTCATTCTAACTATATTTTTTAAACTTTTCAGCATAAAATCTATACAAAATCAATCTTGTTGGATTTTCTTTTACAGGGTCTGACA
AATCGAATGGCAAACTTGGGCATCCAGGATGATTTGAAGATGGATAGTAGTAGAGCAAGAGTGGTTGCACTTGCTTGCAAAATG
GTAGGAGGTGGTAGTGATGGTTCCTTAGATCTTTGTGCAAGGGTTTGCCTCATCGATGAATCCGAAAAGATAATCTTTCATACAT
ATGTGAAGCCACGTCTTCCGGTCACGAAATATAGGTAATTAAATCTTTACAAAAGAACGGTAAATTATGTCACAACTATATTTCGA
CTAAACTTGAAATCTTGAAAACTTTTAGGTATGAAACAACAGGCATGAGACCAGAATTTTTACGGGATGCTATGCCACTTAGGCA
AGTGCAAAGAAAGATTCAAGATTACTTATGTAATGGGGAGCCCATATGGCAGATCCGCTCCAGAGCTGGAAAAGCTAGGATCCT
TGTAGGCCATGGATTAGATCATGATTTGAAAAGCCTTGAAGTAGAGTATCCGCAGATGATGAGGAGGCAAGTTAACCAGCATAT
AACTAAAGACTTTTATGTCATCAATCGTTACACTCAATGACTTAAATCTGAACCATCACACGAATAAAGACTTCTATGTCATAAATT
GTTGCACACAGTGACTGGTTGCGGTTTTCCACAATTTAAGAATTAAGCTGATCATTTTTGTTTGCTCAAGAACAAAGAAAAGAAA
AGTTGAAATGGTTTCACTAATCTGAGATTTTCTCTACAGGGATACCGCAGATTACCCTCCACTGATGAAATCAAGCAAGCTCAGC
AACTCACTTAAATATCTAACGAAAACATACCTTGGGTAGTAGCTTAGCCGAAATTTTTGTCACTTTTCAGTTTACTCATCACTCCT
GGGAGCATGACAAATTTTCCTTTTACAGATATGACATTCAAACTGGTATTCAAGATCCCTATGAAGACTGTGTTGCAACAATGAG
GCTGTACATGAGAATGAGATCACAGCGTCATAAAGTGGAAGACTATCCGCTTGCTCAAGACCCACAAAATCGAAACAATTTTGC
T
SEQIDNO: 375
MRTSYHSAHEPMCGICKKHCRSFESLREHLIGPLPKVECERIFKERGCDLCLTILSSRNALYVHREKCQFSRSNNIGLTHRMANLGIQ
DDLKIDNNRAKVVSLACKMVGGGSDGSLDLCARVCLIDEYEKIIFHTYVKPHLPVTNYRYETTGIRPEFLRDALPLWQVQKKIQDYLCN
GEPVWQIRSRCGKGRILVGHGLDHDLKSLEVEYPQMMDTAKYPPLMKTSKLSNSLKYLMKAYLGYDIQIGIQDPYEDCVATMRLYMR
MRSQRHKVEEYPLASEPQNRNNFAAWRQSELEKMSPEKMLDISRSDYHCWCLDSSS
SEQIDNO: 376
ATGAGGACGTCATATCATTCAGCACATGAACCCATGTGTGGAATTTGTAAAAAGCATTGTCGGTCATTTGAGTCTCTAAGGGAAC
ATCTTATAGGACCGTTACCCAAGGTAGAATGTGAAAGGATATTTAAGGAAAGAGGGTGTGATCTTTGTTTAACCATCCTTAGTAG
CCGTAACGCTCTCTACGTCCACCGAGAGAAATGCCAATTCTCACGCAGCAACAATATTGGTCTGACACATCGAATGGCAAACTT
AGGCATTCAGGATGATTTGAAGATCGATAATAATAGAGCAAAAGTGGTTTCACTTGCTTGCAAAATGGTCGGTGGAGGTAGTGA
TGGCTCCTTAGATCTTTGTGCAAGGGTTTGCCTCATTGATGAGTATGAGAAGATAATCTTTCATACATATGTGAAGCCACATCTG
CCTGTCACAAACTATAGGTATGAAACAACAGGCATAAGACCAGAATTTTTAAGGGATGCTCTGCCGCTTTGGCAAGTGCAAAAG
AAGATTCAAGATTACTTGTGTAATGGGGAGCCTGTATGGCAGATCCGCTCCAGATGTGGAAAAGGAAGGATCCTTGTAGGCCAT
GGATTAGATCACGATTTGAAAAGCCTAGAAGTCGAGTATCCACAGATGATGGACACAGCAAAATATCCTCCACTGATGAAAACG
AGCAAGCTGAGCAACTCGCTGAAATATTTAATGAAAGCATACCTTGGATATGACATTCAAATTGGTATTCAAGATCCCTATGAAG
ACTGTGTTGCAACAATGAGGCTGTACATGAGAATGAGATCACAGCGTCATAAAGTGGAAGAATATCCGCTTGCTTCAGAGCCAC
AAAATAGAAACAATTTTGCAGCATGGAGGCAAAGCGAGCTTGAGAAGATGTCTCCAGAAAAGATGTTGGATATCTCAAGGTCTG
ATTACCATTGCTGGTGCTTAGACTCTAGCAGCTAA
SEQIDNO: 377
ATGAGGACGTCATATCATTCAGCACATGAACCCATGTGTGGAATTTGTAAAAAGCATTGTCGGTCATTTGAGTCTCTAAGGGAAC
ATCTTATAGGTATTCTTCAAACTCCAAGAAGCTACATCATGTTCTTTGACATTTAAGATTTGGCTTCTTCTAACATCTTTGATTTTA
TATATAGGACCGTTACCCAAGGTAGAATGTGAAAGGATATTTAAGGAAAGAGGGTGTGATCTTTGTTTAACCATCCTTAGTAGCC
GTAACGCTCTCTACGTCCACCGAGAGAAATGCCAATTCTCACGCAGCAACAATATTGTACAGATGCTCAAACTAGAATATCTAAC
TACATTCTTTAACCTTTTCGGCATAGAATCAGGATAAAACAATTCTTGCTGGGTTTTCTTTTACAGGGTCTGACACATCGAATGGC
AAACTTAGGCATTCAGGATGATTTGAAGATCGATAATAATAGAGCAAAAGTGGTTTCACTTGCTTGCAAAATGGTCGGTGGAGGT
AGTGATGGCTCCTTAGATCTTTGTGCAAGGGTTTGCCTCATTGATGAGTATGAGAAGATAATCTTTCATACATATGTGAAGCCAC
ATCTGCCTGTCACAAACTATAGGTAATGAAATATTTACAAAACAATGGTAAATTATGTCACGAGTAAATTCTGACTGAACTTGAAA
TCTTAAAAACTTTTAGGTATGAAACAACAGGCATAAGACCAGAATTTTTAAGGGATGCTCTGCCGCTTTGGCAAGTGCAAAAGAA
GATTCAAGATTACTTGTGTAATGGGGAGCCTGTATGGCAGATCCGCTCCAGATGTGGAAAAGGAAGGATCCTTGTAGGCCATG
GATTAGATCACGATTTGAAAAGCCTAGAAGTCGAGTATCCACAGATGATGTTAAGGCAAGTTCTCTCAGCTGAACCAGCACATA
ACTAAAGACTTTTATGTCATAAATTGATACCCTCGATGACTTTAGTCTGAACCAGCACATGACTAAAGACTTCTATGTCATAAATT
GTTGCCCACAGTGACTAGTTCTGATTTTTCACAAATTCAATGTGATGCTGCTCATTTTTGTTTGCCATAAGAACAAAGAAAATAAA
AATTTTGAAATGGAGTCACTAGTCTTAGAATTCTTTCTACAGGGACACAGCAAAATATCCTCCACTGATGAAAACGAGCAAGCTG
AGCAACTCGCTGAAATATTTAATGAAAGCATACCTTGGGTAATTGCTTTGCTGCAATTTCTGTCACTTATCATTTTACTCATGATA
AACCTGGGAGCATGAATATTTTTTCTTTTACAGATATGACATTCAAATTGGTATTCAAGATCCCTATGAAGACTGTGTTGCAACAA
TGAGGCTGTACATGAGAATGAGATCACAGCGTCATAAAGTGGAAGAATATCCGCTTGCTTCAGAGCCACAAAATAGAAACAATT
TTGCAGCATGGAGGCAAAGCGAGCTTGAGAAGATGTCTCCAGAAAAGATGTTGGATATCTCAAGGTCTGATTACCATTGCTGGT
GCTTAGACTCTAGCAGCTAA
SEQIDNO: 378
MKISYHSVHQPQCGVCQKHCKSFASLREHSTGSLAKGNCSKISSERGCSLCMRIFDSPVSLCEHLEICCLPAPFPIDFVKMHWTESQI
DTNDSGRIPEAIAMDCEMVGGGSDGSLDICARVCLVDEEEKPIFHTYVVPLIPVTNFRNEVTGITEENMRDAMPLKEVQDKILQILYNG
ESIGRLRLHGGKARVLVGHSLGHDLNCLRMNYPDHLLRDTAKYPPLMKTNLVSHSLKYLTKTYLGYDIQSGLHDPYEDCVSAMRLYK
KMRSQCHPRKDMGMLLAAHNASTNTFDSWKPKELENMTPDELFNISKSNYKCWCLDSGPLS
SEQIDNO: 379
ATGAAAATCTCGTATCACTCAGTTCACCAGCCTCAATGTGGTGTGTGTCAAAAGCATTGCAAATCCTTTGCATCACTAAGGGAGC
ACTCGACTGGTTCACTGGCTAAAGGGAATTGTTCAAAGATATCCTCTGAAAGAGGTTGCAGCCTCTGTATGAGAATTTTCGACA
GTCCAGTTTCTCTCTGTGAACACCTGGAAATCTGTTGCCTACCTGCTCCTTTCCCCATTGATTTTGTGAAGATGCATTGGACTGA
ATCTCAAATTGATACTAATGACAGTGGGAGGATTCCTGAAGCAATCGCTATGGATTGCGAAATGGTTGGTGGAGGAAGTGATGG
GTCACTGGATATATGTGCTAGGGTGTGCCTTGTTGATGAAGAGGAAAAACCGATTTTCCATACTTATGTAGTACCGCTAATTCCT
GTTACCAATTTTAGGAACGAAGTTACTGGTATTACTGAGGAGAATATGAGAGATGCTATGCCACTCAAGGAAGTGCAAGATAAAA
TTTTGCAGATTCTCTACAATGGAGAGTCGATTGGAAGATTACGGTTACATGGTGGCAAAGCTAGAGTTCTTGTGGGTCATTCCCT
TGGGCACGATTTAAATTGCTTGAGAATGAATTATCCTGATCATCTCCTGAGGGATACAGCAAAATACCCTCCCTTAATGAAGACA
AACCTCGTCAGCCACTCGCTCAAGTACCTCACCAAGACCTATCTCGGGTACGATATCCAGTCGGGGTTGCATGATCCTTACGAA
GATTGTGTATCAGCAATGAGGTTGTACAAGAAAATGCGGTCACAATGTCACCCAAGAAAAGATATGGGGATGTTATTGGCTGCT
CATAATGCATCTACCAACACTTTTGATTCTTGGAAGCCCAAAGAACTTGAGAATATGACACCAGATGAACTTTTCAATATCTCCAA
ATCAAATTACAAGTGTTGGTGTTTGGATTCAGGGCCTCTTTCGTGA
SEQIDNO: 380
ATGAAAATCTCGTATCACTCAGTTCACCAGCCTCAATGTGGTGTGTGTCAAAAGCATTGCAAATCCTTTGCATCACTAAGGGAGC
ACTCGACTGGTGATATACGATACTACAGTTTGGAAAATTTATATGTCAAAGGTTGACTCAGGTGCTCATACGTATAATCATTTTTT
CAAACCTTTAGGTTCACTGGCTAAAGGGAATTGTTCAAAGATATCCTCTGAAAGAGGTTGCAGCCTCTGTATGAGAATTTTCGAC
AGTCCAGTTTCTCTCTGTGAACACCTGGAAATCTGTTGCCTACCTGCTCCTTTCCCCATTGTGAGTTGACCTGGGAAACTTTCCC
TCCTTTTACCTTAAACACAAATTGATAGATTCATAAGCTTTTTTTTTTTTCAGGAAATATTATGGTTGTTGGAAAATGGACTTTGAA
TGTTACAAGCATGTGAACGTCAAAAATTTTGTTTTATTATACAGGATTTTGTGAAGATGCATTGGACTGAATCTCAAATTGATACT
AATGACAGTGGGAGGATTCCTGAAGCAATCGCTATGGATTGCGAAATGGTTGGTGGAGGAAGTGATGGGTCACTGGATATATG
TGCTAGGGTGTGCCTTGTTGATGAAGAGGAAAAACCGATTTTCCATACTTATGTAGTACCGCTAATTCCTGTTACCAATTTTAGG
TATCTGGGTTATGCATATGATCTATTTATTCTTTAAGTTTTTAATTAGGTTAATAGGCATGCTCATCAGTTATAATTCTATGTATATT
ATTGTTTTAGGAACGAAGTTACTGGTATTACTGAGGAGAATATGAGAGATGCTATGCCACTCAAGGAAGTGCAAGATAAAATTTT
GCAGATTCTCTACAATGGAGAGTCGATTGGAAGATTACGGTTACATGGTGGCAAAGCTAGAGTTCTTGTGGGTCATTCCCTTGG
GCACGATTTAAATTGCTTGAGAATGAATTATCCTGATCATCTCCTGAGGTGAAGTCATTTTGGGGCAATTAAGGTTACAAATCCA
TTTTCATGAGATTACATTGCATCCAACAACCTGTTCGAAGAAATTGATTTATTGTCTTCAATGAGAATGGACTTCTTGTGTGGAGG
CTCGTGGACAATACACAGAGCTCATTATATTTTGGTTTATGGTGATTTATGTTCTTTAATTCCAAATCCTACTCCCTTTCCTTTGTC
CCATCTCCAAAAAAAGGGAGGAAATGAGCACCAGAAAATGGGGAGGATCGATCTTAAAAGGCTAACTTATTGGTTTATAAATTTT
AATGATTTCATATTTTCTTGAATTAACTTGACTGAGTTCTCGCCAGTGGATTGTAATATGAACTTCCATTTCTACCTAGTGTATCTA
CGAGCTGGTCATTGTATACTGATTGTCCTTGAATTTTAGCTTCTATAATCAAGAGTAATGAAATAAGAAAGATGTAGATGAAATTG
TTTTGCTGCGTACTGCGTTGCGCTTAATTTTTCACCCTCTTTATGTGCAGGGATACAGCAAAATACCCTCCCTTAATGAAGACAA
ACCTCGTCAGCCACTCGCTCAAGTACCTCACCAAGACCTATCTCGGGTAAGTTGCCATCCAGTGATTATTCTTGGGTTCCTTTTT
TGCTAATTTAAGATACAATTTACCAAAGGAATAGAAGAGCTTTGGAGCTAAATGGAAGTACCAGAGACCAAGTATATAAAAACAA
CCTGAACGACTCTTAGGGGTGGGCGTGGACATTTACAAGGGATTTTTGGCATTCCCTCTGAATAGTCCCCGGTTTTCGTGGGCT
TCCTATTAGTTGCTATTCATAAGTATCTGTCATTCCCTCTGAATAGTCCTCGATTTTTCTTTGGCTTCCTTTCAGTTACTAATCCAT
AATCTCCAATTTTTTTGTCATGAACTCTAGACCAAGTGAAAAATATATTGAAGTTAATAATGTTCTCTGTGTAACTGCAAGAATGG
CAGCTTCAGACAAGCAATATTTTTACAGTGAACTTTTCTGAAAATTGACAGTCTGTTTCTCATGATCATTGATCTGAATTGAGATTT
CAGTAAAATGGCCCAACAGTTTTGTGGTCAAATAGGAAAAATGGTTTTCATCTTTAAGTGCAATCTCCATATACTGCTAAAATAGT
TTAGTAGGGTAACTATTCTAGTCGATTTGCAATTCCTTTAAATGTTTTGATCATGAATATTGTAAGTTTGGTTGATGACATGGGCT
TTGGTTTAATAGGTACGATATCCAGTCGGGGTTGCATGATCCTTACGAAGATTGTGTATCAGCAATGAGGTTGTACAAGAAAATG
CGGTCACAATGTCACCCAAGAAAAGATATGGGGATGTTATTGGCTGCTCATAATGCATCTACCAACACTTTTGATTCTTGGAAGC
CCAAAGAACTTGAGAATATGACACCAGATGAACTTTTCAATATCTCCAAATCAAATTACAAGTGTTGGTGTTTGGATTCAGGGCC
TCTTTCGTGA
SEQIDNO: 381
MKISYHSVHQPQCGVCQKHCKSFASLREHSTGSLAKGNCSKISSERGCSLCMRIFDSPVSLCEHLEICCLPAPFPIDFVKMHWTESQI
DTNDSGRIPEAIAMDCEMVGGGSDGSLDICARVCLVDEEEKPIFHTYVVPLIPVTNFRNEVTGITEENMRDAMPLKEVQDKILQILYNG
ESIGRLRLHGGKARVLVGHSLGHDLNCLRMNYPDHLLRDTAKYPPLMKTNLVSHSLKYLTKTSLGYDIQSGLHDPYEDCVSAMRLYK
KMRSQCHPRKDMGMLLAAHNASTNTFDSWKPKELENMTPDELFNISKSNYKCWCLDSGPLS
SEQIDNO: 382
ATGAAAATCTCGTATCACTCAGTTCACCAGCCTCAATGTGGTGTGTGTCAAAAGCATTGCAAATCCTTTGCATCACTAAGGGAGC
ACTCGACTGGTTCACTGGCTAAAGGGAATTGTTCAAAGATATCCTCTGAAAGAGGTTGCAGCCTCTGTATGAGAATTTTCGACA
GTCCAGTTTCTCTCTGTGAACACCTGGAAATCTGTTGCCTACCTGCTCCTTTCCCCATTGATTTTGTGAAGATGCATTGGACTGA
ATCTCAAATTGATACTAATGACAGTGGGAGGATTCCTGAAGCAATCGCTATGGATTGCGAAATGGTTGGTGGAGGAAGTGATGG
GTCACTGGATATATGTGCTAGGGTGTGCCTTGTTGATGAAGAGGAAAAACCGATTTTCCATACTTATGTAGTACCGCTAATTCCT
GTTACCAATTTTAGGAACGAAGTTACTGGTATTACTGAGGAGAATATGAGAGATGCTATGCCACTCAAGGAAGTGCAAGATAAAA
TTTTGCAGATTCTCTACAATGGAGAGTCGATTGGAAGATTACGGTTACATGGTGGCAAAGCTAGAGTTCTTGTGGGTCATTCCCT
TGGGCACGATTTAAATTGCTTGAGAATGAATTATCCTGATCATCTCCTGAGGGATACAGCAAAATACCCTCCCTTAATGAAGACA
AACCTCGTCAGCCACTCGCTCAAGTACCTCACCAAGACCTCTCTTGGGTACGATATCCAGTCGGGGTTGCATGATCCTTACGAA
GATTGTGTATCAGCAATGAGGTTGTACAAGAAAATGCGGTCACAATGTCACCCAAGAAAAGATATGGGGATGTTATTGGCTGCT
CATAATGCATCTACCAACACTTTTGATTCTTGGAAGCCCAAAGAACTTGAGAATATGACACCAGATGAACTTTTCAATATCTCCAA
ATCAAATTACAAGTGTTGGTGTTTGGATTCAGGGCCTCTTTCGTGA
SEQIDNO: 383
ATGAAAATCTCGTATCACTCAGTTCACCAGCCTCAATGTGGTGTGTGTCAAAAGCATTGCAAATCCTTTGCATCACTAAGGGAGC
ACTCGACTGGTGATATACGATACTACAGTTTGGAAAATTTATATGTCAAAGGTTGACTCAGGTGCTCATACGTATAATCATTTTTT
CAAACCTTTAGGTTCACTGGCTAAAGGGAATTGTTCAAAGATATCCTCTGAAAGAGGTTGCAGCCTCTGTATGAGAATTTTCGAC
AGTCCAGTTTCTCTCTGTGAACACCTGGAAATCTGTTGCCTACCTGCTCCTTTCCCCATTGTGAGTTGACCTGGGAAACTTTCCC
TCCTTTTACCTTAAACACAAATTCATAGATTCATAAGCTTTTTTTTTTTTTCAGGAAATATTATGGTTGTTGGAAAATGGACTTTGAA
TGTTACAAGCATGTGAACGTCAAAAGTTTTGTTTTATTATACAGGATTTTGTGAAGATGCATTGGACTGAATCTCAAATTGATACT
AATGACAGTGGGAGGATTCCTGAAGCAATCGCTATGGATTGCGAAATGGTTGGTGGAGGAAGTGATGGGTCACTGGATATATG
TGCTAGGGTGTGCCTTGTTGATGAAGAGGAAAAACCGATTTTCCATACTTATGTAGTACCGCTAATTCCTGTTACCAATTTTAGG
TATCTGGGTTATGCATATGATCTATTTATTCTTTAAGTTTTTAATTAGGTTAATAGGCATGCTCATCAGTTATAATTCTATGTATATT
ATTGTTTTAGGAACGAAGTTACTGGTATTACTGAGGAGAATATGAGAGATGCTATGCCACTCAAGGAAGTGCAAGATAAAATTTT
GCAGATTCTCTACAATGGAGAGTCGATTGGAAGATTACGGTTACATGGTGGCAAAGCTAGAGTTCTTGTGGGTCATTCCCTTGG
GCACGATTTAAATTGCTTGAGAATGAATTATCCTGATCATCTCCTGAGGTGAAGTCATTTTGGGGCAATTAAGGTTACAAATCCA
TTTTCATGAGATTACATTGCATCCAACAACCTGTTCGAAGAAATTGATTTATTGTCTTCAATGAGAATGGACTTCTTGTGTGGAGG
CTCGTGGACAATATACAGAGCTCATTATATTTTGGTTTATGGTGATTTATGTTCTTTAATTCCAAATCCTACTCCCTTTCCTTTGTC
CCATCTCCAAAAAAAGGGAGGAAATAAGCACCAGAAAATGGGGAGGATCGATCTTAAAAGGCTAACTTATTGGTTTATAAATTTT
AATGATTTCATATTTTCTTGAATTAACTTGACTGAGTTCTCGCCAGTGGATTGTAATATGAACTTCCATTTCTACCTAGTGTATCTG
CGAGCTGGTCATTGTATACTGATTGTCCTTGAATTTTAGCTTCTATAATCAAGAGTAATGAAATAAGAAAGATGTAGATGAAATTG
TTTTGCTGCGTACTCCGTTGCGCTTAATTTTTCACCCTCTTTATGTGCAGGGATACAGCAAAATACCCTCCCTTAATGAAGACAA
ACCTCGTCAGCCACTCGCTCAAGTACCTCACCAAGACCTCTCTTGGGTAAGTTGCCATCCAGTGATTATTCTTGGGTTCCTTTTT
TGCTAATTTAAGATACAATTTACCAAAGGAATAGAAGAGCTTTGGAGCTAAATGGAAGTACCAGAGACTAAGTATATAAAAACAA
CCTGAACGACTCTTAGGGGTGGGCGTGGACATTTACAAGGGATTTTTGGCATTCCCTCTGAATAGTCCCCGGTTTTCGTGGGCT
TCCTATTAGTTGCTATTCATAAGTATCTGTCATTCCCTCTGAATAGTCCTCGATTTTTCTTTGGCTTCCTTTCAGTTACTAATCCAT
AATCTCCAATTTTTTTGTCATGAACTCTAGACCAAGTGAAAAATATATTGAAGTTAATAATGTTCTCTGTGTAACTGCAAGAATGG
CAGCTTCAGACAAGCAATATTTTTACAGTGAACTTTTCTGAAAATTGACAGTCTGTTTCTCATGATCATTGATCTGAATTGAGATTT
CAGTAAGATGGCCCAACAGTTTTGTGGTCAAATAGGAAAAATGGTTTTCATCTTTAAGTGCAATCTCCATATACTGCTAAAATAGT
TTAGTAGGGTAACTATTCTAGTCGATTTGCAATTCCTTTAAATGTTTTGTTCATGAATATTGTAAGTTTGGTTGATGACATGGGCTT
TGGTTTAATAGGTACGATATCCAGTCGGGGTTGCATGATCCTTACGAAGATTGTGTATCAGCAATGAGGTTGTACAAGAAAATG
CGGTCACAATGTCACCCAAGAAAAGATATGGGGATGTTATTGGCTGCTCATAATGCATCTACCAACACTTTTGATTCTTGGAAGC
CCAAAGAACTTGAGAATATGACACCAGATGAACTTTTCAATATCTCCAAATCAAATTACAAGTGTTGGTGTTTGGATTCAGGGCC
TCTTTCGTGA
SEQIDNO: 384
MESRNESSEISRNKCAACFRQFNKMEHLVEHMRISYHSVHEPMCGICKKHCRSYESLREHVIGPLPKQECKNIFSIRGCKFCLTILDSP
NARRVHQERCQLSGGLLASFANLGLRDNLTIDNGYARGRQVVALACKMVGGGSDGSIDLCARVCLIDENENIIFHTYVKPPIPVTNYR
YETTGIRPEYLRDATPLRQVQKKIQDFLCNGEPTWKIRPRGGKARILVGHDLDRLQLEYPAVMMRDTAKYPPLMKTSKLSNSLKYLTQ
AYLGYDIQTGMQDPYEDCVATMRLYIRMRSQNHTIEDYPLAFDPQNRNNFASWRQSELERMSPEEMFAISRSDYYCWCLDS
SEQIDNO: 385
CGTCTTAACTAGTTTTCTACTACTCTTGCAGATTTAACAACTATTTACTTTACGAGGATCGCATGGAGTCCAGAAATGAGTCGTCC
GAGATTTCAAGGAACAAGTGTGCTGCATGCTTTAGACAATTCAACAAAATGGAACACCTAGTGGAGCACATGAGAATATCGTAT
CACTCAGTCCATGAACCCATGTGTGGAATCTGTAAGAAACATTGCAGATCTTATGAGTCCTTGAGGGAGCATGTTATAGGGCCA
TTGCCTAAGCAAGAATGTAAGAATATTTTCAGTATCCGTGGATGCAAATTTTGCTTAACCATCCTTGATAGCCCTAATGCTCGCA
GAGTTCACCAAGAAAGATGCCAGCTCTCCGGTGGACTACTTGCAAGCTTTGCTAATTTAGGCCTTCGGGACAACCTGACAATCG
ACAATGGTTATGCAAGAGGTCGACAGGTAGTTGCCCTAGCTTGCAAAATGGTTGGAGGAGGCAGTGATGGCTCCATAGACCTT
TGCGCAAGGGTTTGCCTGATTGACGAAAATGAAAATATTATCTTCCATACCTATGTCAAACCACCAATTCCTGTCACAAACTATA
GGTATGAAACCACAGGCATTAGACCAGAATACCTAAGGGATGCAACACCATTAAGGCAAGTTCAAAAGAAGATTCAAGACTTCC
TTTGTAATGGAGAACCGACGTGGAAAATTCGTCCTAGAGGAGGAAAAGCCAGGATTCTCGTGGGTCATGACCTTGACCGTTTG
CAACTAGAATATCCAGCTGTAATGATGAGGGATACTGCAAAATATCCGCCACTGATGAAAACAAGCAAGCTCAGCAACTCCTTG
AAGTATCTAACCCAAGCCTATCTCGGGTATGACATCCAAACTGGCATGCAAGATCCTTATGAAGATTGTGTTGCTACAATGAGG
CTCTACATAAGAATGAGATCACAAAATCATACGATAGAGGATTACCCTCTCGCTTTTGATCCACAAAACCGAAACAATTTTGCTTC
GTGGAGGCAAAGTGAGCTTGAAAGGATGAGCCCCGAAGAAATGTTTGCCATATCAAGATCTGATTACTACTGCTGGTGCTTGGA
TTCTTAAGCAAGGGACTTTTCCCGACTAGTAAGCAAAGGCAACTTTGTGTCCATGCGAAATGAACACACTTCCAAACTATTCGAT
ATTTTATATTAAGAAGAAAAATAAATTGGGAAGCTTCTGCCATTCCATTACCACTCCCCTCTAGATTACTGGAACGTACTGAATAT
GTTATTCAATATGTAATAAGTAGTTTCTTTAATATAAATTTGGTAATATATATTTAATAAAAGTATAACACATAATGGTAATTTATGT
GTTAATTACTGCAATTTCTGTGTCTAA
SEQIDNO: 386
CGTCTTAACTAGTTTTCTACTACTCTTGCAGATTTAACAACTATTTACTTTACGAGGATCGCATGGAGTCCAGAAATGAGTCGTCC
GAGATTTCAAGGTTCTCACTCTCACTCTCTCCTCTCCACGCACATATACATGGAAACCGACACGTACATGGTTTTGATTCAAGCT
ATATCATGCATGTCATATTGTCAAATTGGTGACCTTCATGTCAAGCTAGCTTTTAATTCCTAAACCCTAGTTTCTAGCTAGCGATA
AATAACTTGATGATTATCCTTCTGCAGGAACAAGTGTGCTGCATGCTTTAGACAATTCAACAAAATGGAACACCTAGTGGAGCAC
ATGAGAATATCGTATCACTCAGTCCATGAACCCATGTGTGGAATCTGTAAGAAACATTGCAGATCTTATGAGTCCTTGAGGGAG
CATGTTATAGGTAAATGTTTGTTTTCTTAGCGTGTACAACTCGGAGCACTTGGTTTTCTCTTCGGTAGCTTAAAAGTTTGATTTTC
TCTTACAGGGCCATTGCCTAAGCAAGAATGTAAGAATATTTTCAGTATCCGTGGATGCAAATTTTGCTTAACCATCCTTGATAGC
CCTAATGCTCGCAGAGTTCACCAAGAAAGATGCCAGCTCTCCGGTGTAAATGCTGTATTAATCTTTAATTTAATACTTCGAAAAA
AAAGATAAACTAAATTAAGTTTTGTTTTTTCAACCGAATTAGTTCTAAACTAAAAGAATGCCTCACTAGTTCTTTTATTGCACACTC
CAGGGACTACTTGCAAGCTTTGCTAATTTAGGCCTTCGGGACAACCTGACAATCGACAATGGTTATGCAAGAGGTCGACAGGTA
GTTGCCCTAGCTTGCAAAATGGTTGGAGGAGGCAGTGATGGCTCCATAGACCTTTGCGCAAGGGTTTGCCTGATTGACGAAAA
TGAAAATATTATOTTCCATACCTATGTCAAACCACCAATTCCTGTCACAAACTATAGGTATATATGCTATAAATTTATATACTGCTT
CTGCCCGAAAATCAAACAATGCAGTCGTTAATAGTGAATTAAATATTCTTCAAATATTTCTAGGTATGAAACCACAGGCATTAGAC
CAGAATACCTAAGGGATGCAACACCATTAAGGCAAGTTCAAAAGAAGATTCAAGACTTCCTTTGTAATGGAGAACCGACGTGGA
AAATTCGTCCTAGAGGAGGAAAAGCCAGGATTCTCGTGGGTCATGACCTTGACCGTTTGCAACTAGAATATCCAGCTGTAATGA
TGAGGTTAAGTTTTTCTCCGAAGCTTAGCTATACAAGTCATAGCCTCAAAAATAATTGCCTTGATCTACTTCTAATTATTTATCAGT
TTAAATTATAAAAATTCGTCTTTTTTAAAACAAAATATAATGTGATTAATTAAGAAGGATGGATTTCATTACAGGGATACTGCAAAA
TATCCGCCACTGATGAAAACAAGCAAGCTCAGCAACTCCTTGAAGTATCTAACCCAAGCCTATCTCGGGTAAGCATATGCATCTT
CTGCTATATTTGTTTTCCTTCCGTGTCTAAGTATATGTTTAATTTACTTGCAGGTATGACATCCAAACTGGCATGCAAGATCCTTA
TGAAGATTGTGTTGCTACAATGAGGCTCTACATAAGAATGAGATCACAAAATCATACGATAGAGGATTACCCTCTCGCTTTTGAT
CCACAAAACCGAAACAATTTTGCTTCGTGGAGGCAAAGTGAGCTTGAAAGGATGAGCCCCGAAGAAATGTTTGCCATATCAAGA
TCTGATTACTACTGCTGGTGCTTGGATTCTTAAGCAAGGGACTTTTCCCGACTAGTAAGCAAAGGCAACTTTGTGTCCATGCGAA
ATGAACACACTTCCAAACTATTCGATATTTTATATTAAGAAGAAAAATAAATTGGGAAGCTTCTGCCATTCCATTACCACTCCCCT
CTAGATTACTGGAACGTACTGAATATGTTATTCAATATGTAATAAGTAGTTTCTTTAATATAAATTTGGTAATATATATTTAATAAAA
GTATAACACATAATGGTAATTTATGTGTTAATTACTGCAATTTCTGTGTCTAA
SEQIDNO: 387
MDAEADPPTRSRTERHKCFACYKQFKKKEHLVEHMKISYHTPHQPKCGVCQKHCKSFESLRNHLTGPLSRAGCSRTFSAQGCDLCL
KLYDSPSSLGKHREICHLSAPASLGTKILPFAGSVDVKYTTKGAKAIAINCGLVGGGTDGSLDLCARVCLVDEDENIIFHTYVQPQSAVT
DYRYEITGLTEEHLRNSKSHKEVQDRILEILYNGESARRLMSDSGKARLLVGHDLKRGLDCLRINYPGHLLRDTAKYRPLLKTNLVSHS
LKYLTKTYLGYDIQTGEHDPYVDCVSVMRLYKRMRAQDHQGKGIGTPDSDSGFESQKAEELENMTPDELYQISKSDYKCWCLDSSIA
AGLNS
SEQIDNO: 388
GAAGACTAGTTTGATTTTTGCAACTTCATCAACCAGTTAAACAGTGAAGAAATGCACTCCGATTTGTTCATCTCTTTTTCTTTTCTT
TTTTAAATATACTACCATCAAAAACCCATCCTAACCCCTTCTCCTCCTCTGTCTCTGTGACGCCCGATCCTAAGAAGAATCGCCA
TGGATGCTGAAGCTGACCCACCAACAAGATCGCGAACCGAAAGGCACAAGTGCTTTGCATGCTACAAGCAATTCAAGAAAAAA
GAACATCTTGTTGAGCACATGAAGATTTCCTACCACACACCTCATCAGCCTAAATGTGGGGTCTGCCAAAAGCACTGCAAATCTT
TTGAATCTCTGAGGAATCACCTTACTGGCCCATTATCAAGGGCTGGTTGTTCGAGGACTTTCTCTGCCCAAGGTTGTGATCTCT
GCTTGAAACTCTATGATAGCCCCAGTTCTCTTGGCAAGCATAGAGAAATATGCCACCTATCTGCTCCTGCTTCCCTTGGAACAAA
GATATTGCCTTTTGCAGGATCTGTTGATGTAAAGTACACCACCAAAGGTGCCAAAGCCATTGCTATCAACTGTGGGTTGGTTGG
TGGTGGAACCGATGGATCACTTGACCTTTGCGCAAGGGTGTGTCTGGTTGATGAAGATGAAAATATTATTTTCCATACATATGTT
CAACCTCAAAGTGCTGTTACCGATTACAGATACGAAATAACTGGATTAACTGAAGAGCATCTAAGAAATTCGAAGTCTCATAAGG
AAGTACAAGACAGAATTCTGGAAATTTTGTACAATGGAGAATCTGCTAGGAGACTAATGTCAGACAGTGGAAAGGCTAGACTGC
TTGTGGGTCATGACTTGAAGCGTGGTTTGGATTGCTTGAGGATAAACTATCCTGGTCATTTGCTGAGGGATACTGCAAAATACC
GACCATTGTTGAAAACTAACCTGGTTAGCCACTCGCTCAAGTACCTCACCAAAACATATCTTGGGTATGATATCCAGACAGGGG
AACATGATCCATACGTAGATTGTGTTTCTGTTATGAGACTGTACAAGAGAATGCGTGCTCAAGATCATCAAGGTAAAGGAATTGG
AACTCCAGATTCAGACAGCGGTTTTGAGTCCCAGAAAGCAGAGGAACTCGAGAACATGACCCCAGATGAGCTATACCAGATCT
CAAAGTCAGACTACAAATGTTGGTGTCTAGATTCAAGTATAGCAGCAGGGCTTAACAGTTGATTTTTAGTTTCTCATCTTTGATCT
TTGTGCACTCGGCGGGACAATATTTTGCTGCTCAAAGAAATAGGAATGACGTGATGTGCTGCTAGGTATGAAGGATTCGTGTAC
AGTTTTTGCTGTAATGCAAAGTGAAGCATATATTCGCGTAGTTGTTTATATATGTTTGTTTACATTTCTTGAACTCTAAAGCAAACG
GGAGAGTTTCTAATATT
SEQIDNO: 389
GAAGACTAGTTTGATTTTTGCAACTTCATCAACCAGTTAAACAGTGAAGAAATGCACTCCGATTTGTTCATCTCTTTTTCTTTTCTT
TTTTAAATATACTACCATCAAAAACCCATCCTAACCCCTTCTCCTCCTCTGTCTCTGTGACGCCCGATCCTAAGAAGAATCGCCA
TGGATGCTGAAGCTGACCCACCAACAAGATCGCGAACCGAAAGGTCTCTCTCGCTCCCTCTTTCTCGCTGTATTCTGCATTTTTT
TTTTTTATTCTCGCTTTCATATGTGTCAATAATTTGTTCTTACAATTCGTTTCTTTTTCTTGATAATGAATTCGGGCTGTCTTCTTCA
GAAACTCCAAGTCCATGCCATGTATATGAAATTGTTTAATTCCTCGTGTTGTTTCATGGAAGCAGGCACAAGTGCTTTGCATGCT
ACAAGCAATTCAAGAAAAAAGAACATCTTGTTGAGCACATGAAGATTTCCTACCACACACCTCATCAGCCTAAATGTGGGGTCTG
CCAAAAGCACTGCAAATCTTTTGAATCTCTGAGGAATCACCTTACTGGTATCATTCTATTCCATGTTCTGATTGCTTTATCTGTTA
AAGTTTACTGCTTTTTTTTTCATGTTTTCCTCCAATTATTTAGGCCCATTATCAAGGGCTGGTTGTTCGAGGACTTTCTCTGCCCA
AGGTTGTGATCTCTGCTTGAAACTCTATGATAGCCCCAGTTCTCTTGGCAAGCATAGAGAAATATGCCACCTATCTGCTCCTGCT
TCCCTTGTAAGTTGTTGATTCGTAAATTCTTATGCAAAAATGGTAACTTGTCTATCTTTTAGTGCTTTTCATTTTATTTATTGTACAT
TTTAAATGATTAATTACTAAAAGTCATGTCACCCATTTCCTTTTTTTTTTCACAGGGAACAAAGATATTGCCTTTTGCAGGATCTGT
TGATGTAAAGTACACCACCAAAGGTGCCAAAGCCATTGCTATCAACTGTGGGTTGGTTGGTGGTGGAACCGATGGATCACTTGA
CCTTTGCGCAAGGGTGTGTCTGGTTGATGAAGATGAAAATATTATTTTCCATACATATGTTCAACCTCAAAGTGCTGTTACCGATT
ACAGGTACTTCTGTGTTGACACAATCCTTGGTTTTATTTAAAGAACAATGAGGGGGAGGGGAGGGGGAATATATTTACAAAAGT
CTTTTTTTTTTTAATTGAAACTTATACACATGTTTTCAGATACGAAATAACTGGATTAACTGAAGAGCATCTAAGAAATTCGAAGTC
TCATAAGGAAGTACAAGACAGAATTCTGGAAATTTTGTACAATGGAGAATCTGCTAGGAGACTAATGTCAGACAGTGGAAAGGC
TAGACTGCTTGTGGGTCATGACTTGAAGCGTGGTTTGGATTGCTTGAGGATAAACTATCCTGGTCATTTGCTGAGGTAGATTAAA
CTCTTCTGATGGTTGAAATTGGAATTTGGGATGGAACATTACAGTTTGTAATAATACTTATGATTCAGGCTTGAAAAACATTACTG
AGCCGCACCACTGCTTTACAAATCTGACCTTTGAATAATTGAATAATACCACTAATCCGCCATGTAGTCTACTTCTAGGTGAAGC
AAATCCTAAAATACTACTAATTGCTGATGGAAGAATGACACTTGGTGGTCATTTTGACGTGTCTTGGAATAAACCAACAAATTTTC
ATATTATTGAATAGGAGCTTTTTGCTGCACATTGAGTACTGATAATAATTGAAGGTTTGGTAAGCTTTCTTGTGACTTTACTGTTG
TTTTGCAACATTCTAGCTTTTCATGGGATGTATCCAAACACATTCTAAATGAACATAAGACCAGATAGTGGTGAGGTTTACCTCGT
CTTAAACTCCCTTCCCCATGCTAGGAGTGCCGTAGTATATCTTCAACTGCTGGCAAATCTTGTCTTGGCATCCATATTAGGAGTG
ACCCCCCCTACAGGCCAAGACAGAACCTTGGGGACTGGCCCAAATTATGGTAGGTAATTGAGAAAACAATTCAAATAGTTTTTTT
TTTTTCTTGTTCTGGAGATCCTGTAATTTGAAATGTAATATTTGAGTTATCCATCACAAATGTTGTGTGCATGTTCTCCTTGTTCTC
ATCTTTCCTTCTTTTATAGTTACAATGCACTTTGATTTTGATTTGAGCAGGGATACTGCAAAATACCGACCATTGTTGAAAACTAA
CCTGGTTAGCCACTCGCTCAAGTACCTCACCAAAACATATCTTGGGCAAGTTGCTCTTTCTTTTCTTGTTTCTTTCGTGATGTCTT
AATAGTGATTGGATCTTCCCTCCTGCATGTACGATGGCTGAATCCTTATATGGCTAACTATTTTAATTAGTAACCAATACTTGAAC
TAGAAATGATGCTTTTGTGTTATCTGTCTTTTTTTTTTTTTTCCAAGTAAAATGCAACTCAGATGTAATTAAAAATTATGCAAATCAA
TTCCCAAGTTAAAAGATTTTTTTTTTTTGAAAATTTTATAACACTTGGATTTACAATGCTCGAACGCTGTATTTCTGTAAACATAGTT
GGTAACTATTTCTTCCTCAATTCTTAGCAGAAAAGACTGGAATTTCTCATCATGTTCGTCAAAGAGGATTTGGGAAAGATGATATC
TTCTTTGTGCCTAATATGTTGGTTTTCCAGAACTCAGATACTACTTTCAGCAAACACTGTTTTGAAAGTCATTATTGGTTCACAAAT
AAGAGGTCATTGTGGAGAGTTTAACGAACATTTAACCTTTTGTTGATCTGTTTTTCTAGTTTTTGGAATGATCACCGTGCACTTCA
TATTTATGGGCAGTATTTGCTAGTTGAAATTACTCTCTCTGAAGTTTTTTGCCTCACAGGTATGATATCCAGACAGGGGAACATG
ATCCATACGTAGATTGTGTTTCTGTTATGAGACTGTACAAGAGAATGCGTGCTCAAGATCATCAAGGTAAAGGAATTGGAACTCC
AGATTCAGACAGCGGTTTTGAGTCCCAGAAAGCAGAGGAACTCGAGAACATGACCCCAGATGAGCTATACCAGATCTCAAAGT
CAGACTACAAATGTTGGTGTCTAGATTCAAGTATAGCAGCAGGGCTTAACAGTTGATTTTTAGTTTCTCATCTTTGATCTTTGTGC
ACTCGGCGGGACAATATTTTGCTGCTCAAAGAAATAGGAATGACGTGATGTGCTGCTAGGTATGAAGGATTCGTGTACAGTTTT
TGCTGTAATGCAAAGTGAAGCATATATTCGCGTAGTTGTTTATATATGTTTGTTTACATTTCTTGAACTCTAAAGCAAACGGGAGA
GTTTCTAATATT
SEQIDNO: 390
MDPSETLRNKCAACYRQFNRFEHLVEHMRTSYHSVHEPMCGICGKRCRSFESLREHLIGPLPKAECERVFRDRGCDICLTILTSRYAL
RAHRDACQLSCGNNGLLHRFANMGIQDDLRIDSGKSRAVALACKMVGGGSDGSLDLCAKICIIDEYENTIFRSYVKPQLPVTNYRYET
TGIRPEYLRDAMPLRQVQRKIQDFLCNGEPIWKIRPRGGKARILVGHGLDHYLRCLEFDYPSLKIRDTATYPPLMKTSKLSNSLKYLTK
AYLGYDIQVGIQDPYEDCVATMRLYRRMRSQAHRNENHPLASDPQNKNNFASWRQGELERMSPNDLLAISRSDYYCWCLDNKDYI
SEQIDNO: 391
ATGGATCCTTCAGAAACTCTAAGGAACAAGTGTGCAGCCTGCTATCGGCAATTCAACAGATTTGAGCACCTAGTGGAACACATG
AGAACTTCATATCACTCGGTTCATGAACCCATGTGTGGAATTTGTGGAAAACGATGCCGATCGTTTGAATCTCTTCGTGAGCATC
TTATAGGGCCATTGCCAAAGGCAGAATGTGAAAGGGTGTTCCGCGACCGTGGATGTGACATTTGCTTAACCATCCTTACCAGCC
GTTATGCTCTCAGGGCTCACCGTGATGCATGCCAACTCTCTTGTGGCAATAACGGTTTATTACACCGATTTGCTAACATGGGGA
TACAAGATGATTTAAGAATCGATAGCGGCAAATCAAGAGCAGTTGCACTTGCGTGCAAAATGGTCGGTGGTGGTAGTGATGGTT
CATTGGATCTTTGTGCAAAAATTTGCATCATTGATGAATATGAAAACACAATATTTCGTTCATATGTCAAACCGCAGCTTCCTGTT
ACAAATTACAGGTATGAGACAACAGGCATTCGGCCAGAATACCTTCGGGACGCAATGCCACTTAGGCAGGTTCAAAGAAAGATT
CAAGATTTTCTATGCAATGGTGAACCCATTTGGAAGATCCGCCCAAGAGGTGGGAAGGCAAGGATTCTTGTAGGTCATGGTTTG
GATCATTATCTTAGATGCTTGGAATTCGATTACCCTTCACTTAAAATTAGGGATACAGCAACCTATCCGCCATTAATGAAGACTAG
CAAGCTCAGCAATTCATTGAAGTATCTCACAAAAGCATACCTTGGATATGATATTCAAGTTGGGATACAAGATCCTTATGAAGAC
TGTGTTGCAACAATGAGACTTTACAGGAGGATGAGATCACAGGCTCATAGAAACGAGAACCATCCGCTTGCTTCAGATCCACAA
AATAAGAATAATTTTGCTTCATGGAGACAAGGTGAGCTTGAGAGAATGAGTCCTAATGATCTGCTGGCAATCTCGAGGTCTGAC
TATTATTGTTGGTGCTTGGATAATAAAGATTATATTTAA
SEQIDNO: 392
ACCAAATACTCTTTTCAAGACCATTAATTCCCGTTACAACAAATCATCTAATTTCTAGAATTAGCAAGTTTATTGACGCACGGAAG
CAAGAATAAATGAATAATACTTCCAAAAAGGGGACAGTTTTATTCAAATCCAGGATGCCCAAGGCTTAAAGGTGCCCTATATATA
AGGTGGGGCTAAAGTTGGCACAAATTTGGAAAATTTAAATTTAATCCTATTAACTTCATACAAATAACCAGCTAATTAAATAAACA
AGAGAAGAAAAATAAAAGAAATTCCAAGAAATTGTATATTTTGTCATCAACATAGAATCAACCAAATTATCGAAATGAGTTGCAGT
TTGCGAAAACTACAAATTGGAGACCAAAATGTCAGCCGATGTGAGTGTGGATCTTCTATTCAAGGGGTCAGTCAAAAAGTTCAC
ATGTGCTTCTTTCCTAGCGGAAACCCGGGCACGCCTACATACGTCCAGGGACAATTTTATGTAGTGTGAAGGTGGGTCCTAGAA
ATTTTCAAATTTCTTATAATTTATAAAGAAATTTTTTGAGGAACTAACTTAAAAATAACTTATGACCTACCTTATCTTCAAAAATCAT
AGTATTTGTATAGAAAATTATATTTAGAAAGTTTTGGTAACCATTTGGTTTTCATTTCTAGATTCTCCCCTGCATACGTCAAAAAGA
ACGTTTAACCATATCATGCATGGCGGTACTTGAAGACCTGGAGCTCTTTACAGTGAGTCGCATGTTCCTCAAAAGTGTCCAAAC
ATGTCTTGCGACAAACTGGACATGCATTACCAACCGGAATAATAGAATCATGAGGGGATACTTGATGATAATACGATATTTCATT
GGTGATATATGTTGACCTAAACCCTTTATAGGGATAGCCAGTAGTTAAATTAAATATAGAAAGCAACATATGAGTGTTTATAAAAA
TCAAGATTTTATGTTTTTGCATGGGTATCTCACAGAGGGCCGGGAAGGAACCAATTGACAATAAATAAAAGGAATAAAGTAATAG
AAATAGTAATGAGAGAGGACAATTATTCTCTACGATGTGGAGTAGGACCATGCATGGGTTTATCAAGCATGTTCATTTGTTCTTG
GAATATGCAGTCAACCATTCAAGAGACTAGAGATAGAGACTTCCCCACGTGAGCACTAACGCAAAAAGTACTTAATTAAGGAAT
CATTCAAGAGAATTCTCAGGTTGTACTATCAACTACTTTTAACTTTCTAAGTTCTAACCCCGACTATGTTTTACCAGCATGTACTTC
AGGCTTACTACGTACTCACCATCACTGCATGAAAAGTTAATAGGATCGATCCATTTTATATATGAAAATAGAAATATATATATATA
CCTTTAATTTCCAGGTCTACTGATGTTATAAATACATTCAACATTCTTCCCTTTCCTCCTCAAACCCTCTCAACATTTCTTCTCCTA
CAACTACAAGCTAAGAAACAACTACTACTATTATTTTATTCCAAAATGGATCCTTCAGAAACTCTAAGGTAACAACCATAAATCAA
TATTTCTGCATGCTTATATATATATATATATATATATATATATATATATATATATATATATATATATATATATATATATATATATATATA
TATATATATATATATATATATATATATATATATAATCAACAACATTTATATTCAAATATATAACATCCTAAACTTAATTTACCATGCAT
TAATATTTTGTCCAGGAACAAGTGTGCAGCCTGCTATCGGCAATTCAACAGATTTGAGCACCTAGTGGAACACATGAGAACTTCA
TATCACTCGGTTCATGAACCCATGTGTGGAATTTGTGGAAAACGATGCCGATCGTTTGAATCTCTTCGTGAGCATCTTATAGGTA
TATATATATTAATTACATGATGTATATTCAATTACTCATTAGAGTAATTGATCAATCAGTTAACGTTCTTAATTGATATAACTACAAG
ATATTAAATTCTTAATTAATTCACAGGGCCATTGCCAAAGGCAGAATGTGAAAGGGTGTTCCGCGACCGTGGATGTGACATTTG
CTTAACCATCCTTACCAGCCGTTATGCTCTCAGGGCTCACCGTGATGCATGCCAACTCTCTTGTGGCAATAACGTAAATCCTCG
ATCTTTTAAAAAAACTATCTATTTTCTCGATATATTGCGAGTGTACATGTGTTTTAATTAAGAATTATTTTGGCTATGATTACTTAAA
TTCAGGGTTTATTACACCGATTTGCTAACATGGGGATACAAGATGATTTAAGAATCGATAGCGGCAAATCAAGAGCAGTTGCACT
TGCGTGCAAAATGGTCGGTGGTGGTAGTGATGGTTCATTGGATCTTTGTGCAAAAATTTGCATCATTGATGAATATGAAAACACA
ATATTTCGTTCATATGTCAAACCGCAGCTTCCTGTTACAAATTACAGGTAAAGATCTTCTTTCACCTTCTTAATTTCCCCATTTGTT
TAATCCCCACATATATAATCTTTTATAATTAATAAAAATGTTGTGACATTTAATTCATAGGTATGAGACAACAGGCATTCGGCCAG
AATACCTTCGGGACGCAATGCCACTTAGGCAGGTTCAAAGAAAGATTCAAGATTTTCTATGCAATGGTGAACCCATTTGGAAGAT
CCGCCCAAGAGGTGGGAAGGCAAGGATTCTTGTAGGTCATGGTTTGGATCATTATCTTAGATGCTTGGAATTCGATTACCCTTC
ACTTAAAATTAGGCAAGCAATCACACCTTCTAAATTTCAACATACTTTCTCAAGTTATCGACATATCCAATTTGACGTTAATTTGTA
TATATGCGCTAATTTTGTCACAGGGATACAGCAACCTATCCGCCATTAATGAAGACTAGCAAGCTCAGCAATTCATTGAAGTATC
TCACAAAAGCATACCTTGGGTAATCTTTGATACCTTAAACATTTAATTAAGGATTCGAAGTAAAATTAATTTTAATTTCTGTATTTT
GTTATTTACGTAGATATGATATTCAAGTTGGGATACAAGATCCTTATGAAGACTGTGTTGCAACAATGAGACTTTACAGGAGGAT
GAGATCACAGGCTCATAGAAACGAGAACCATCCGCTTGCTTCAGATCCACAAAATAAGAATAATTTTGCTTCATGGAGACAAGG
TGAGCTTGAGAGAATGAGTCCTAATGATCTGCTGGCAATCTCGAGGTCTGACTATTATTGTTGGTGCTTGGATAATAAAGATTAT
ATTTAAACAAAGGGAAGGATTGATCGAATCAAGATTTAATAGCTAAATTGAACAAATAATTAAGTTTACAAAAACTATTAGTTATGA
GTATGAATAGGAATAAGGCATGGAAATTTGTCCATGATTTGTAGTAGATGAGATAATGCATACTACGTACGATTTTATGAGACGC
GTGTCTGTACGAATTAATATTTCTGTTAGAATATGAATAAATATGTGTTGTAATAATCTTTGTAAAGAAACGTCTGTTATTTGAGAT
TGAGAATTAGTACACACTTGAAACGCATACATAGTAATGCAAGAAATTCCATGAAGACATCAATTAATAGTAACGTACACAACTAT
CATGCCCTTTAATATTTCCATAAAGACCATGAAAAACAATTAGAACTGAAATGAGAAGGAACCACCTGAAGTGAATAATCGAAGA
ATCACAATGGGAAAATGGACTTTCGTTAGAATTCATGACTTACGATCAATGTGACGTGGGATATGGTGGAAAGATCGAGTCTCA
GAACATTTATCTCACGTACAAACTTAAAGCTATGTTCTATTAATTCAAGAGGTAATTAGTTTAAAATGTTAAAAACATAAAATTGCT
TTTGAGACCTATTATAATTACTTCTGTGATCGGTTCTAAAATCCATAAAAAAAACATTGTGATTCATTCTGGAATTGGTTTTAACTT
TTAACATTACAACATCCGTTGGTTTTGGTTTCAAGAGTCGTTGAACACTCATTATTAACAAAAAAATATGGCAAATGATAAATAATT
GTCTTAAACCACATTGATGCAATTAAGAGATATAGAGTGGTCTCATACTGTTGGGAAAAATAAACTGTGTATTATTCTCTTTAATC
ATTTATGTACTTTTGTCTTAGATAAGGACCGTTTTTTAATTTTATTATTCTGGACAATTTTTTAAATTTTGTCTTACAGAGGACTAAT
TTTGTATTCTCTTTTACACATCACCGTTTCTATAAAATTGTTTTAAATTTTTTTTTTCCGGCAACAACAAGCTAAAACTCCATTAAAA
CCCAGTAAAAGACACTGGGAGAACAAAGAGATTACAGGTTATAAAAAGGATTTGACATCCACAAGTTCAAATCCGGTAATTTTAA
GTTACTCCTATTGAACAACCAATAATAAGCAAACTCCTGAGATCTCCTTAAGCAAAACTCTTTCTCCACTCTTTTATTGTTAAAAAT
AATATCATTTCTATGAATCCATGTAGATTTGAGCAAAGCCACCACCAGCACCTTGACCATTTTGATTCTCGACGGGGCTCGGAAA
ACACAATCAATCCAAGCAAAGCAATCCCTTAGAGTTTCAAAAGAAGGAATAGAGCAGTTGACCAACAAGCCGAGTCTCGCCCAT
AACCAGGTTACGAAATCACATTAGAAGAACACGTGACTAGTATCCTCCGCTTGATCACCACAAATCTCACAATTTGAGCTTGGGA
CATCGAAGCCCATCTCCACTAGATTTTTTTCGAACCGCAATTC
SEQIDNO: 393
MDPSETLRNKCAACYRQFNRFEHLVEHMRTSYHSVHEPMCGNCGKRCRSFESLREHLIGPLPKAECERVFRDRGCDICLTILTSRYA
LRAHRDACQLSCGNNGLLHRFANMGIQDDLRSDSGKSRAVALACKMVGGGSDGSLDLCAKICIIDEYENTIFRSYVKPQLPVTNYRY
ETTGIRPEYLRDAMPLRQVQRKIQDFLCNGEPIWKIRPRGGKARILVGHGLDHYLRCLEFDYPSLKMRDTATYPPLMKTSKLSNSLKY
LTKAYLGYDIQVGIQDPYEDCVATMRLYRRMRSQAHRNENYPLASDPQNKNNFASWRQGELERMSPDDLLAISRSDYYCWCLDNK
DYI
SEQIDNO: 394
ATGGATCCTTCAGAAACTCTAAGGAACAAGTGTGCAGCCTGCTATCGGCAGTTCAACAGATTTGAGCACCTAGTGGAACACATG
AGGACTTCATATCACTCGGTTCATGAACCCATGTGTGGAAATTGTGGAAAACGATGCCGATCCTTTGAATCTCTTCGTGAGCATC
TTATAGGGCCATTGCCAAAGGCAGAATGTGAAAGGGTGTTCCGTGACCGTGGATGTGACATTTGCTTAACCATCCTTACCAGCC
GCTATGCTCTCAGGGCTCACCGTGATGCATGCCAACTCTCTTGTGGCAATAACGGTTTATTACACCGATTTGCTAACATGGGGA
TACAAGATGATTTACGAAGCGATAGCGGGAAATCAAGAGCAGTTGCACTTGCGTGCAAAATGGTCGGTGGTGGTAGTGATGGT
TCATTGGATCTTTGTGCAAAAATTTGCATCATTGATGAATATGAAAACACAATATTTCGTTCCTATGTCAAACCGCAGCTTCCTGT
TACAAATTACAGGTATGAGACCACAGGCATTCGGCCAGAATACCTCCGGGACGCAATGCCACTTAGGCAGGTTCAAAGAAAGA
TTCAAGATTTCTTATGCAATGGTGAACCCATTTGGAAGATCCGCCCAAGAGGTGGGAAGGCAAGGATTCTTGTAGGTCATGGTT
TGGATCATTATCTTAGATGCTTGGAATTCGATTACCCTTCACTTAAAATGAGGGATACAGCAACCTATCCGCCATTAATGAAGAC
TAGCAAGCTCAGCAATTCATTAAAGTATCTCACAAAAGCATACCTTGGATATGATATTCAAGTTGGGATACAAGATCCTTATGAA
GACTGTGTCGCAACAATGAGACTTTACAGGAGGATGCGATCACAGGCTCATAGAAACGAGAACTATCCACTTGCTTCAGATCCA
CAAAATAAGAACAATTTTGCTTCATGGAGACAAGGTGAGCTTGAGAGGATGAGTCCTGATGATCTGCTGGCAATTTCGAGGTCT
GATTACTACTGTTGGTGCTTGGATAATAAAGATTATATTTAA
SEQIDNO: 395
AACCCCGGCACGCCTACATACGTCAAAAAGAACATCCCTAACCATATCATGGCGGTACTTGAAGACCAGGTACTCTTTACAGTG
AACCGCATGTTCCCCAAAAGTGTCCAAACATGTCTTGCGACAAACTGGACATGCGTCACCAACCAGAAATAATGGAATCATGAG
GCGATACTTAATGATAGTACGATATTCTACTGGTGATATATGTTGACCTAAACCCTTTACAATAAATTAAATATATAGAAAGCAGC
ATATGAGTGTTTATAAAAATCAAGACTTTATGTTTTTGCATGGGTGTATCTCACAGAGGGACGGGAAGGAACCAAATTGACAGTA
AATAAAAGGAATAAAGTAATAGAAATAGTAATGCGAGAGGACAAATATTCTCTACGATGTGGAGTAGGACCATGCATGGGTTTAT
CAAGCATGTTCATTTGTTCTTTGAATATGCAGTCAACCATTCAAGAGACTAGAGATAGAGACTTCCCCACGTGAACACTAACGCA
AAAAGTTCTTAAGGAATCATTCAAGAGAATTCTCAGGTTGTACTATCAACCACCTCTAAGTTCTAACCCCGACTATGTTTTACCAG
CATGTACTTCAGGCTTACTACGTACTCACCATCACTGCGTGAAAAGTTACTTGGATCCATTTTATATATACCTTTAATTTCCAGGT
CTACTGATGTTATAAATACCATCAACATTCTTCCATTTCCTCCTCAAACTCTCTCAACATTTCTTCTCCCACAACTACAAGAAACCA
CTATCATTTTATTTCAAAATGGATCCTTCAGAAACTCTAAGGTAACGACCATAAATCAATATTTCTGCATGCTTATTATATATATCA
AAGATGACATGCCACTTGCATTCCATGATAATATATATAATTATTAATTAACAGCATCACTTGTGATCAGTCTGCATTTATATTCAA
ATATATAACATCCCGTAACTTATATCTTACCATGCATTGATATTTTGTCCAGGAACAAGTGTGCAGCCTGCTATCGGCAGTTCAA
CAGATTTGAGCACCTAGTGGAACACATGAGGACTTCATATCACTCGGTTCATGAACCCATGTGTGGAAATTGTGGAAAACGATG
CCGATCCTTTGAATCTCTTCGTGAGCATCTTATAGGTATATATATTAATTACATAATGTATATATCAATTACTCATTTGAGTAAATC
AATCAACTAACGCTTTGATATAATTAATTACATGATGTTAATTTCTTAATTAATTCACAGGGCCATTGCCAAAGGCAGAATGTGAA
AGGGTGTTCCGTGACCGTGGATGTGACATTTGCTTAACCATCCTTACCAGCCGCTATGCTCTCAGGGCTCACCGTGATGCATGC
CAACTCTCTTGTGGCAATAACGTAAATCCTCGATCTTTAATTAAACAAAACTATCTATTTTCTCGATATGTGTAAGTGTACGTACAT
GTGTTTTAATCAAGAATTATTTTGGATATGATTACTTCAATTCAGGGTTTATTACACCGATTTGCTAACATGGGGATACAAGATGA
TTTACGAAGCGATAGCGGGAAATCAAGAGCAGTTGCACTTGCGTGCAAAATGGTCGGTGGTGGTAGTGATGGTTCATTGGATC
TTTGTGCAAAAATTTGCATCATTGATGAATATGAAAACACAATATTTCGTTCCTATGTCAAACCGCAGCTTCCTGTTACAAATTAC
AGGTACAGATCTTCTTTCACCTTCTTAATTGCCCCATTTGTTTAATCGATATCCCCATATATATAATCTTTTATAATTAATACAATAG
TTGTGACATTTAATTAATTCATAGGTATGAGACCACAGGCATTCGGCCAGAATACCTCCGGGACGCAATGCCACTTAGGCAGGT
TCAAAGAAAGATTCAAGATTTCTTATGCAATGGTGAACCCATTTGGAAGATCCGCCCAAGAGGTGGGAAGGCAAGGATTCTTGT
AGGTCATGGTTTGGATCATTATCTTAGATGCTTGGAATTCGATTACCCTTCACTTAAAATGAGGCAAGCAATCACACTTTCTAAAT
TATAACACACTTTCTCAAGTTATCGACATATCCAATTTGACGTTAATTTGTATATCTGCGCTAATTTTATCACAGGGATACAGCAA
CCTATCCGCCATTAATGAAGACTAGCAAGCTCAGCAATTCATTAAAGTATCTCACAAAAGCATACCTTGGGTAATTAATCTTTTAT
ACCTTAAACATTAATTTAAGAATTCGAGGTAAAATTAATTTTAATTTGTGTATTTTCTTATTTACATAGATATGATATTCAAGTTGGG
ATACAAGATCCTTATGAAGACTGTGTCGCAACAATGAGACTTTACAGGAGGATGCGATCACAGGCTCATAGAAACGAGAACTAT
CCACTTGCTTCAGATCCACAAAATAAGAACAATTTTGCTTCATGGAGACAAGGTGAGCTTGAGAGGATGAGTCCTGATGATCTG
CTGGCAATTTCGAGGTCTGATTACTACTGTTGGTGCTTGGATAATAAAGATTATATTTAAACAAAGGGAAGGATTGGTCAAATCA
AGATTTGATAGCTAAAGTGAACAAATAATATTAAGTTTGCAAAAATTAATAGTTATGAGTATGAATAGGAATAAGGCATGGAAATT
TGTCCATGATTTGTAGTGGATGAGATAATGCATAGTACGATTTTATGAGACGCGTGTCTTTACGAATTAATATTTCAGTTAGAATA
TGAATAAATATGTGTTGTAATAATCTTTGTAAAGAAACGTCTGTTATTTGAGATTGAGAATTAGTACGCGTACATAGTGATGCAAG
AAATTCCTTGAAGGCATCAATTAATAGTAACACAACTATCATGGCCTTTAATATTTCCATAAGGACCATGAAAAACAATTAGAACT
GAAATGAGAAGGAACCACCTGAAGTGAATAATCGAAAAATCACAATGGGAAAATGGAGTTTCGTTAGAATTCATGACTTACGATC
AATGTGACGTGGGATATGGTGGAAAGATCGAGTCTCAGAACATTTATCTCACGCTACAAACTTAAAGCTATGTTCTATTAATTCA
AGAGGGACTAATTAGTTTAAAATGTTAAAAACATAGAATTGTTATATATTGAGACCTATTATAATTACTTCTGTGATCGGTTCTAAA
ATCCATAATAAAAACATTGTGATTCATTCTGGAATTGGTTTTAACTTTAAACATTACAACATCCGTTGGTTTTGGTTTCAAGAGTCG
TTGAACACTCATTATTAACAAAAAAAATATGGCAAATGATAAATAATTGTCTTAAACCACATTGATGCAATTAAGAGATATAGAGT
GGTCTCATATTGTTGGGAAAAATAAACTGTGTATTATTCTCTTTGATCATTATGTACTTTTGTCTTAGATAAGGACCGTTTTTAAAT
TTTATTATTCTGGACAGTTTTTAAAAGTTTGTCTTATAGAGGACTAATATTGTATTCTCTTTTACACATCACCGTTTCTATAAAAATA
AGGACCAATTTTGTAATTTCTCACATACGAACCAATTTTCTCATTTTGTCTACATGAAATTATAGAGACCAAAAATTCAATTTACTG
AGACAAATATATTCTAACATTGATTTGACCTTAAGAACAATTACTAACAATGTATATAATATAATGTTGACTTAGCCATTTCCTAAA
TTTGTTATTCAATAGATCCTCTAGTTATTCAGTTATTCTTTTATGTATTATTCGGATTAAACAGATAACCATATTACATGGCATTGTT
GGTTTGGCATCACTTGTCGCTTCAAAAGCCACTTAGTTTTTTTTTTTAAACTAAAATTCGTTCTTACTCATTCGAAAGAAACGATAT
TATTTGTTATTGATCTGTAAACAAAACCAAGTTTTGTAATGAACCTTTCGTTTCTGACCACTAGCGTCCATCTCTCAACCACCAAA
GAATAAGAATCTTGAAAGTAAAAATAAAAACCTGGAAACTAAAAATAAAAAGGTAGAAACTAAGAATAAAAATCTAATATCATATT
CTTTT
SEQIDNO: 396
MGPSETLRNKCAACYRQFNRFEHLVEHMRTSYHSVHEPMCGICGKRCRSFESLREHLIGPLPKAECERVFRDRGCDICLTILTSRYA
LRAHRDACQLSCGNNGLLHRFANMGIQDDLRIDSGKSRAVALACKMVGGGSDGSLDLCAKICIIDEYENTIFRSYVKPQLPVTNYRYE
TTGIRPEYLRDAMPLRQVQRKIQDFLCNGEPIWKIHPRGGKARILVGHGLDHYLRCLEFDYPSLKIRDTATYPPLMKTSKLSNSLKYLT
KAYLGYDIQVGIQDPYEDCVATMRLYRRMRSQAHRNENHPLASDPQNKNNFASWRQGELERMSPNDLLAISRSDYYCWCLDNKDYI
SEQIDNO: 397
ATGGGTCCTTCAGAAACTCTAAGGAACAAGTGTGCAGCCTGCTATCGTCAATTCAACAGATTTGAGCACCTAGTGGAACACATG
AGAACTTCATATCACTCGGTTCATGAACCCATGTGTGGAATTTGTGGAAAACGATGCCGATCGTTTGAATCTCTTCGTGAGCATC
TTATAGGGCCATTGCCAAAGGCAGAATGTGAAAGGGTGTTCCGCGACCGTGGATGTGACATTTGCTTAACCATCCTTACCAGCC
GTTATGCTCTCAGGGCTCACCGTGATGCATGCCAACTCTCTTGTGGCAATAACGGTTTATTACACCGATTTGCTAACATGGGGA
TACAAGATGATTTAAGAATCGATAGCGGCAAATCAAGAGCAGTTGCACTTGCGTGCAAAATGGTCGGTGGTGGTAGTGATGGTT
CATTGGATCTTTGTGCAAAAATTTGCATCATTGATGAATATGAAAACACAATATTTCGTTCATATGTCAAACCGCAGCTTCCTGTT
ACAAATTACAGGTATGAGACAACAGGCATTCGGCCAGAATACCTTCGGGACGCAATGCCACTTAGGCAGGTTCAAAGAAAGATT
CAAGATTTTCTATGCAATGGTGAACCCATTTGGAAGATCCACCCAAGAGGTGGGAAGGCAAGGATTCTTGTAGGTCATGGTTTG
GATCATTATCTTAGATGCTTGGAATTCGATTACCCTTCACTTAAAATCAGGGATACAGCAACCTATCCGCCATTAATGAAGACTA
GCAAGCTCAGCAATTCATTGAAGTATCTCACAAAAGCATACCTTGGATATGATATTCAAGTTGGGATACAAGATCCTTATGAAGA
CTGTGTTGCAACAATGAGACTTTACAGGAGGATGAGATCACAGGCTCATAGAAACGAGAACCATCCGCTTGCTTCAGATCCACA
AAATAAGAATAATTTTGCTTCATGGAGACAAGGTGAGCTTGAGAGAATGAGTCCTAATGATCTGCTGGCAATCTCGAGGTCTGA
CTATTATTGTTGGTGCTTGGATAATAAAGATTATATTTAA
SEQIDNO: 398
TCCCGTTACAACAAATCATCTAATTTCTAGAATTAGCAAGTTTATTGACGCACGGAAGCAAGAATAAATGAATAATAATTCCAAAA
AGGGGACAGTTTTATTCAAATCCAGGATGCCCAAGGCTTAAAGGTGCCCTATATATAAGGTGGGGCTAAAGTTGGCACAAATTT
GGAAAATTTAAATTTAATCCTATTAACTTCATACAAATAACCAGCTAATTAAATAAACAAGAGAAGAAAAATAAAAAAAATTCCAAG
AAATTGTATATTTTGTCATCAACATAGAATCAACCAAATTATCGAAATGAGTTGCAGTTTGCGAAAACTACAAATTGGAGACCAAA
ACGTCAGCCGATGTGAGTGTGGATCTTCTATTCAAGGGGTCAGTCAAAAAGTTCACATGTGCTTCTTTCCTAGCGGAAACCCGG
GCACGCCTACATACGTCCAGGGACAATTTTATTTAGTGTGAAGGTGGGTCCTAGAAATTTTCAAATTTCTTATAATTTATAAAGAA
ATTTTTTTGAGGAACTAACTTAAAAATAACTTAGGACCTACCTTATCTTTAAAAATCATAGTATTTGTATAGAAAATTATATTTAGAA
AATTTTGGTAACCATGTGGTTTTCATTTCTAGATTCTCCCCTGCATACGTCAAAAAGAACGTCTCTAACCATATCATGCATGGCG
GTACTTGAAGACCAGGAGCTCTTTACAGTGAGTCGCATGTTCCTCAAAAGTGTCCAAACATGTCTTGCGACAAACTGGACATGC
ATTACCAACCGGAATAATAGAATCATGAGGAGATACTTGATGATAATACGATATTTCATTGGTGATATATGCTGACCTAAACCCTT
TATAGGGATAGCCAGTAGTTAAATTAAATATAGAAAGCAACATATGAGTGTTTATAAAAATCAAGATTTTATGTTTTTGCATGGGT
ATCTCACAGAGGGCCGGGAAGGAACCAATTGACAATAAATAAAAGGAATAAAGTAATAGAAATAGTAATGAGAGAGGACAATTA
TTCTCTACGATGTGGAGTAGGACCATGCATGGGTTTATCAAGCATGTTCATTTGTTCTTGGAATATGCAGTCAACCATTCAAGAG
ACTAGAGATAGAGACTTCCCCACGTGAGCACTAACGCAAAAAGTACTTAAGGAATCATTCAAGAGAATTCTCAGGTTGTACTATC
AACTACTTTTAACTTTCTAAGTTCTAACCCCGACTATGTTTTACCAGCATGTACTTCAGGCTTACTACGTACTCACCATCACTGCA
TGAAAAGTTAATAGGATCGATCCATTTTATATATGAAAATAGAAATATATATATACCTTTAATTTCCAGGTCTACTGATGTTATAAA
TACCTTCAACATTCTTCCCTTTCCTCCTCAAACCCTCTCAACATTTTCCCTTTCCTCCTCAAACCCTCTCAACATTTCTTCTCCTAC
AACTACAAGCTAAGAAACAACTACTACTATTATTTTATTCCAAAATGGGTCCTTCAGAAACTCTAAGGTAACAGCCATAAATCAAT
ATTTCTGCATGCTTTTATATATATATATATATATATATATATATATATATATATATATATATATATATATATATATATATATATATATAT
ATATATATATATATATAATCAACAACATTTAAATTCAAATATATAACATCCTAAACTTATATCTTACCATGCATTAATATTTTGTCCA
GGAACAAGTGTGCAGCCTGCTATCGTCAATTCAACAGATTTGAGCACCTAGTGGAACACATGAGAACTTCATATCACTCGGTTC
ATGAACCCATGTGTGGAATTTGTGGAAAACGATGCCGATCGTTTGAATCTCTTCGTGAGCATCTTATAGGTATATATATATTAATT
ACATAATGTATATTCAATTACTCATTAGAGTAATTGATCAATCAATTAACGTTCTTAATTGATATAACTACAAGATACTAAGTTCTTA
ATTAATTCACAGGGCCATTGCCAAAGGCAGAATGTGAAAGGGTGTTCCGCGACCGTGGATGTGACATTTGCTTAACCATCCTTA
CCAGCCGTTATGCTCTCAGGGCTCACCGTGATGCATGCCAACTCTCTTGTGGCAATAACGTAAATCCTCGATCTTTTAAAAAAAC
TATCTATTTTCTCGATATATTGCGAGTGTACATGTGTTTTAATTAAGAATTATTTTGGCTATGATTACTTAAATTCAGGGTTTATTAC
ACCGATTTGCTAACATGGGGATACAAGATGATTTAAGAATCGATAGCGGCAAATCAAGAGCAGTTGCACTTGCGTGCAAAATGG
TCGGTGGTGGTAGTGATGGTTCATTGGATCTTTGTGCAAAAATTTGCATCATTGATGAATATGAAAACACAATATTTCGTTCATAT
GTCAAACCGCAGCTTCCTGTTACAAATTACAGGTAAAGATCTTCTTTCACCTTCTTAATTTCCCCATTTGTTTAATCCCCACATATA
TAATCTTTTATAATTAATAAAAATGTTGTGACATTTAATTCATAGGTATGAGACAACAGGCATTCGGCCAGAATACCTTCGGGACG
CAATGCCACTTAGGCAGGTTCAAAGAAAGATTCAAGATTTTCTATGCAATGGTGAACCCATTTGGAAGATCCACCCAAGAGGTG
GGAAGGCAAGGATTCTTGTAGGTCATGGTTTGGATCATTATCTTAGATGCTTGGAATTCGATTACCCTTCACTTAAAATCAGGCA
AGCAATCACACCTTCTAAATTTCAACATACTTTCTCAAGTTATCGACATATCCAATTTGACGTTAATTTGTATATCTGCGCTAATTT
TATCACAGGGATACAGCAACCTATCCGCCATTAATGAAGACTAGCAAGCTCAGCAATTCATTGAAGTATCTCACAAAAGCATACC
TTGGGTAATCTTTGATACCTTAAACATTTAATTAAGGATTCGAAGTAAAATTAATTTTAATTTCTGTATTTTGTTATTTACGTAGATA
TGATATTCAAGTTGGGATACAAGATCCTTATGAAGACTGTGTTGCAACAATGAGACTTTACAGGAGGATGAGATCACAGGCTCAT
AGAAACGAGAACCATCCGCTTGCTTCAGATCCACAAAATAAGAATAATTTTGCTTCATGGAGACAAGGTGAGCTTGAGAGAATG
AGTCCTAATGATCTGCTGGCAATCTCGAGGTCTGACTATTATTGTTGGTGCTTGGATAATAAAGATTATATTTAAACAAAGGGAA
GGATTGATCGAATCAAGATTTAATAGCTAAATTGAACAAATAATTAAGTTTACAAAAACTATTAGTTATGAGTATGAATAGGAATAA
GGCATGGAAATTTGTCCATGATTTGTAGTAGATGAGATAATGCATACTACGTACGATTTTATGAGACGCGTGTCTGTACGAATTA
ATATTTCTGTTAGAATATGAATAAATATGTGTTGTAATAATCTTTGTAAAGAAACGTCTGTTATTTGAGATTGAGAATTAGTACACA
CTTGAAACGCATACATAGTAATGCAAGAAATTCCATGAAGGCATCAATTAATAGTAACGTACACAACTATCATGCCCTTTAATATT
TCCATAAAGACCATGAAAAACAATTAGAACTGAAATGAGAAGGAACCACCTGAAGTGAATAATCGAAGAATCACAATGGGAAAAT
GGACTTTCGTTAGAATTCATGACTTACGATCAATGTGACGTGGGATATGGTGGAAAGATCGAGTCTCAGAACATTTATCTCACGT
ACAAACTTAAAGCTATGTTCTATTAATTCAAGAGGTAATTAGTTTAAAATGTTAAAAACATAAAATTGCTATTGAGACCTATTATAA
TTACTTCTGTGATCGGTTCTAAAATCCATAAAAAAACATTGTGATTCATTCTGGAATTGGTTTTAACTTTTAACATTACAACATCCG
TTGGTTTTGGTTTCAAGAGTCGTTGAACACTCATTATTAACAAAAAATATGGCAAATGATAAATAATTGTCTTAAACCACATTGAT
GCAATTAAGAGATATAGAGTGGTCTCATACTGTTGGGAAAAATAAACTGTGTATTATTCTCTTTAATCATTTATGTACTTTTGTCTT
AGATAAGGACCGTTTTTTAATTTTATTATTCTGGACAATTTTTTAAATTTTGTCTTACAGAGGACTAATTTTGTATTCTCTTTTACAC
ATCACCGTTTCTATAAAATTGTTTTAAATTTTTTTTTCCGGCAACAACAAGCTAAAACTCCATTAAAACCCAGTAAAAGACACTAG
GAGAACAAAGAGATTACAGGTTATAAAAAGGATTTGACATCCACAAGTTCAAATCCGGTAATTTTAAGCTACTCCTATTGAACAA
CCAATAATAAACAAACTCCTGAGATCTCCTTAAGCAAAACTTTTTCTCCACTCTTTTATTGTTAAAAATTATATCATTTCTATGAATC
CATGTAGATTTGAGCAAAGCCACCACCAGCACCTTGACCATTTTGATTCTCGACGGGGCTCGGAAAACACAATCAATCCAAGCA
AAGCAATCCCTTAGAGTTTCAAAAGAAGGAATAGAGCAGTTGACCAACAAGCCGAGTCTCGCCCATAACCAGGTTACGAAATCA
CATTAGAAGAACAGGTGACTAGTATCCTCCGCTTGATCACCACAAATCTCACAATTTGAGCTTGGGACATCGAAGCCCATCTCC
ACTAGATTTTTTTCGAACCGCAATTCTGC
SEQIDNO: 399
MILAQLARALVSLWEVQCSNLLDSVMHRVLITHEGVRYEYYQCSGNPSREAPCVKFLPGNPMVRTALRMSRTRALSEIMGAWLPLIH
PPNKCAACYRQFNKKEHLVEHMRISYHSLHEPMCGICGKRCRSFESLRDHLIGPLPKAECERVFRDRGCTICLTILNSPYSLKVHQDR
CQLARGSNGVLHRFANMGIQDDLRIDSGKTRAVALACKMVGGGSDGSLDICARVCIIDEYENILFHSYVKPQLPVTNYRYETTGIRPEY
LRDAMPLRNVQRKIQDFLCNGEPIWKIRPRGGNARILVGHGLEHDMKCLEIQYSLVKIRDTAKYPPLMKTSKLSNSLKYLTKSYLGYDI
QNGIQDPYDDCVATMRLYRRMRSQAHRMEEYPLATDSQNKNNFSSWRQGELEKMSPDELLAISRDRVATKSNLEKMGIRAGKFGTI
VVIYYSYASYISTTDSDTDIQCFKLVHLRRGDCTETRPSCAPLNLMNRLHPGLMTLKAPKIVIIVIWKIDIESKKKKPKVMKRVGTVLELLL
LRRSLCAGFQDVLAPLFLPGFLPFGAGDVLESCCLGALFFAWGCL
SEQIDNO: 400
ATGATTTTGGCTCAGCTGGCAAGAGCGCTGGTCTCCCTCTGGGAGGTCCAGTGTTCGAACCTTCTGGACAGCGTGATGCATCG
GGTTTTAATAACCCATGAGGGTGTGAGGTACGAGTATTATCAATGCTCCGGTAATCCTTCGCGCGAAGCCCCGTGTGTGAAATT
TCTCCCTGGAAACCCTATGGTTCGAACTGCCCTTCGGATGTCTCGAACTCGGGCGCTCTCTGAAATAATGGGAGCGTGGCTTC
CGTTGATCCATCCGCCGAACAAATGTGCAGCATGCTATAGGCAGTTTAACAAGAAGGAGCACTTGGTGGAACACATGAGGATTT
CATATCACTCACTTCATGAACCCATGTGTGGAATTTGTGGCAAACGTTGTCGCTCTTTTGAATCTCTTCGTGATCATCTTATAGGA
CCATTGCCAAAGGCCGAATGTGAAAGAGTGTTTAGAGACCGTGGATGTACCATTTGCCTAACCATTCTTAATAGCCCATATTCTC
TAAAGGTTCACCAAGATCGATGCCAACTAGCACGTGGAAGTAATGGTGTACTGCATAGATTTGCAAACATGGGCATTCAAGATG
ACTTGAGAATCGATAGTGGGAAAACAAGAGCAGTTGCACTTGCTTGCAAGATGGTTGGAGGTGGTAGTGATGGATOTTTAGATA
TTTGTGCAAGAGTTTGCATCATTGATGAATATGAGAACATATTATTTCATTCCTATGTCAAGCCACAACTTCCTGTTACAAACTAT
AGGTATGAGACTACAGGCATCCGACCAGAGTACCTTAGGGATGCAATGCCACTCAGAAATGTCCAAAGAAAAATTCAAGATTTT
TTGTGTAATGGGGAACCGATATGGAAAATACGTCCAAGAGGTGGAAATGCGAGGATTCTTGTAGGACATGGTTTGGAGCATGA
CATGAAATGTTTGGAAATTCAGTATTCTTTAGTAAAGATAAGGGATACTGCAAAATATCCACCATTAATGAAGACAAGCAAGCTAA
GCAACTCACTCAAGTACCTAACAAAATCTTACCTAGGGTATGATATTCAAAATGGGATACAAGATCCTTATGATGATTGTGTTGC
AACGATGAGACTTTATAGAAGAATGAGATCACAAGCTCATAGAATGGAGGAGTATCCTCTTGCTACAGATTCCCAAAACAAGAAT
AACTTTTCATCATGGAGGCAGGGTGAGCTTGAGAAGATGAGCCCTGATGAATTGTTGGCAATCTCAAGGGACAGGGTCGCAAC
GAAGAGCAATTTGGAGAAGATGGGAATCAGAGCAGGGAAATTTGGTACAATAGTCGTAATATACTACAGCTACGCTAGTTACAT
CAGTACTACAGACTCTGATACGGACATCCAATGCTTCAAGCTTGTACACCTTCGACGAGGAGACTGCACAGAGACTAGACCATC
GTGCGCACCGTTAAACCTGATGAATCGCCTCCATCCCGGTTTGATGACCTTGAAAGCACCGAAAATTGTGATTATAGTGATATG
GAAAATCGACATAGAATCGAAGAAGAAGAAACCGAAAGTGATGAAGAGAGTCGGAACTGTTCTTGAACTCTTGCTGCTTAGGCG
TTCGTTATGTGCTGGGTTTCAGGACGTTCTTGCTCCCCTGTTCCTTCCCGGCTTTCTCCCCTTTGGTGCTGGTGATGTCTTGGA
GTCTTGCTGTTTGGGTGCCTTGTTTTTTGCTTGGGGCTGTTTGTGA
SEQIDNO: 401
GAAATGGCGGAGTTAAATAATCTGATCAGCATTGTGTCTCAAATCCGGACCTCGGTGGGTCAAGATCTCTGGATTTCCGAATTG
TCTTCAGATGGTCTTTTTGCTGTTCGTGATCTGCGCCATGCCATCGATGAGGTGATCACTACTCCGGCTCCTAACCCGACTATTT
GGATCCACATTATCCCGGTGAAAGTTATTTGTTTTGTTTGGCGAGTGTGTCTAGATCGTATCCCAACTGCTATCGCCCTATCAAA
GCGTGGTGTCCAAGTCCCGTCTAGTAGTTGCGCGTTTTGTATCAATGGAATTGATGAGGTAAATCACTTGATGGCCGACTGTCC
TTTTGCAAAAGAAATCCTCGAGTGGATTTTTGCCTGGTGTGGTATTCCTTTGCCTCAGTTCTCAAAAGTGGTGGACATTGTGGAC
TTCGCCGGTAACTGGGGTCGTTGTCCAAAGAAACGCAAAATTATGGTGGCTATTTGTTACGGATATATCTGGAGTTTATGGAAG
GCTCGGAATGACAAGGTGTTCAACAAATGCTCAACTCCGGTGGGGAAGATGAAAGACAATATCGTTTTATTGGTTTTCGATTGG
ATTAAAAACAGAGGAAATTATAAAAATTGTAATTTACCAGTGTGGAGTTGTTCCCCCTTTGATATTTTGTAATTTTGTCCCTTTCCT
GCCCCTACTTTTTTTCTCTTAAGGTGGTGTCTTAATAAAATTGCCTTTTCAAAAAAAAAGAACCAGATAAAAAAGAATGAAAAAAA
CTGGACCCAGTGTCAATGGTATCCATGCAAATTTTATGCTGCGTTCTTTTTCACAATCTTGTTTTTATTTGGGTACATTTTCAAAG
CTCGAATCTTCTTGGTCAAAAGTTTTTCATCCCAGAATCCCCACATCTTTTGTGCAACCCATGATAGTAACAACTACAAAAGGAAA
TCTAGGACCCGGTTCACCCATTACATATTATTACATGTATGTTTGTTGGCTCACTACTAATAAGGTCACTTCTTTACATAACTATAA
TGGAAAATTACAGATATTATCCCGCTATTATTAGTTTGCAAAATTACAGACTTGGTCTTCGCGTAATAGTAAAATTACATAAAATGT
CCGTGACTCCATGGGTCCTAACACTTTGCATGGAACATGGTCTTCGCTTGATAGTAAAATTACATAAAATGTCCATGACTCCGTA
GGTCCTTACACTTTGCATGAAATAGAGAAAATAGAGTGACTGTCCCTGGCGTAAAATGTAAAAGTTACAGAAATAGTCTATGCGT
AATAGTAAAATTATAGAGATGACTCCTATGCCATATATAGTGGAAAACAATATTATAGAAATAGTTTTTATGTCCTTACATATTTTA
GGAAATAAAGTTGTGTATTAGTTTATTTGGTTGAAAATAAACTTTTGTACATATAGGATTAACAAACTCTCGTGGCAACATGCCGC
TTAAAACCCTCGTGTTCCAATACATTTAAGTGATTAGCTAGGATTTTATGATTTTGGCTCAGCTGGCAAGAGCGCTGGTCTCCCT
CTGGGAGGTCCAGTGTTCGAACCTTCTGGACAGCGTGATGCATCGGGTTTTAATAACCCATGAGGGTGTGAGGTACGAGTATT
ATCAATGCTCCGGTAATCCTTCGCGCGAAGCCCCGTGTGTGAAATTTCTCCCTGGAAACCCTATGGTTCGAACTGCCCTTCGGA
TGTCTCGAACTCGGGCGCTCTCTGAAATAATGGGAGCGTGGCTTCCGTTGATCCATCCGCCGTTTCCAAAAAAAAAAAAAAACT
ATGTGAATTCAATAGTATAACATTTACTGCATGAAGATACAAAAAATGTCATCTTAATTTAGAAATATGCTAACTAATGTAATAGTG
TGTAACCAAGGTGAACACAATAGCATGTGAGCATGGAATATATTGCCATCATATAGAAGCATAAAGGAGCAAAAATACTCTCTAA
ATCCTAAGTGTTGACCAAATTCTGCAAGTATGAACTGTGTTTTTCTTGAATGGGGCATGTGCATTGAAGATTCCAAAGATGGAGA
CCGAAATCCGTATGCACTAGCGCGAAAAAAGGGTCTTAAAGGAATCAGTCCTTTTGTTGTACTAATCTTAATGTTATAAATACATT
GCACGTTCCTACCATTTCTTACTACAAGTCCTCTCAGTTTTTTGATAAAAAGATTGATTTAGTGATATCAAAGTTGAGAGAACAAT
TAATGGATTCTGAGACTCAAAGGTAGTAAGCATAAAATACTCGCATTTCATACAAAAACTAACACACAAGTIGTTAAAAATGATAC
AATAAAATCATCTTGCTTTTGATCTTATTATTAATTAGCATGTTTTTTACTAGGAACAAATGTGCAGCATGCTATAGGCAGTTTAAC
AAGAAGGAGCACTTGGTGGAACACATGAGGATTTCATATCACTCACTTCATGAACCCATGTGTGGAATTTGTGGCAAACGTTGT
CGCTCTTTTGAATCTCTTCGTGATCATCTTATAGGTATAATTACATTATCATTATTATATGTTTTAAAAAGTTTAGTTACTATATATT
GATGGTATTAACATATATGAATTCGGGTTTTCCACAGGACCATTGCCAAAGGCCGAATGTGAAAGAGTGTTTAGAGACCGTGGA
TGTACCATTTGCCTAACCATTCTTAATAGCCCATATTCTCTAAAGGTTCACCAAGATCGATGCCAACTAGCACGTGGAAGTAATG
TAATGCATCATTATATATATCCTTCAACTTATAATTTTCCAGCAAATGACTTATAGTCTAGTAGTATTAGGTGTTGACACAGTGATC
ACTCTCAGCCTTAATCCGTGAGGGTTCATTTCCTGTCATATGAAATAATGTTCTAGTTTTGGTTGTATACATAAATATAAAAACCA
AAGAGCTTCTACCTTAGCGGTATCCAGTGTTTTCCTCCCTCTTTGAGGTCGATGGTTTAAATCTTATATGAGACATAGGTGAATAT
ACGGAGTAGTTTAGGATTAGATTAGAATTGTCTTTTCAAAAAAAATATAAATACAAAAATATACCCAATTTTGATATATTTATATAT
GTTCCAGGGTGTACTGCATAGATTTGCAAACATGGGCATTCAAGATGACTTGAGAATCGATAGTGGGAAAACAAGAGCAGTTGC
ACTTGCTTGCAAGATGGTTGGAGGTGGTAGTGATGGATCTTTAGATATTTGTGCAAGAGTTTGCATCATTGATGAATATGAGAAC
ATATTATTTCATTCCTATGTCAAGCCACAACTTCCTGTTACAAACTATAGGTGCTATATAGTTTTCCATAATAAAATTATAAAACAA
AGTTGCTATTTTCTTATTTAAGAAAGTATGCAGGTATGAGACTACAGGCATCCGACCAGAGTACCTTAGGGATGCAATGCCACTC
AGAAATGTCCAAAGAAAAATTCAAGATTTTTTGTGTAATGGGGAACCGATATGGAAAATACGTCCAAGAGGTGGAAATGCGAGG
ATTCTTGTAGGACATGGTTTGGAGCATGACATGAAATGTTTGGAAATTCAGTATTCTTTAGTAAAGATAAGGCACGTATATATATT
TAGCTACTTTATTTAATATTTATACATATATATAATTAGTCCCATAACTTATTGTACTTAACTAATAGTAATTATATGCACTTGTTATT
GGATAGGGATACTGCAAAATATCCACCATTAATGAAGACAAGCAAGCTAAGCAACTCACTCAAGTACCTAACAAAATCTTACCTA
GGGTAAAGACATTACCTTTATTTTTATAAAGATATGTGATATGTTAGTATGTTCCTGATGAATTTTTATTGTATAGGTATGATATTC
AAAATGGGATACAAGATCCTTATGATGATTGTGTTGCAACGATGAGACTTTATAGAAGAATGAGATCACAAGCTCATAGAATGGA
GGAGTATCCTCTTGCTACAGATTCCCAAAACAAGAATAACTTTTCATCATGGAGGCAGGGTGAGCTTGAGAAGATGAGCCCTGA
TGAATTGTTGGCAATCTCAAGGTCTGATTACTACTGTTGGTGCTTAGATAGCAAAGATGTGGCTTGAAATGAAGGGAAGATTGAA
GAAAATAGCTAAACTGATTTAAAACTCATCAAATATAAATGGAATAAACATGGATACACATATATTTAAAATGTTTTACATCTCTAT
TAATTTAGAAGTAGTAAGAAGGCAGCTGTATTGCTATGTAAGCAGTGGCGGATCCAGAAAAAAATTTAAGTGGGTGCAATCTAAA
TTTTTATAAGATTTATATTAATTTTCTAGTATTTTAAAATATAAAATCATATATGTTATATAGAAAAATTGGAAAAATTAATATTTAAG
TGGGACACTCCACCCCCTTGGCTAAGGGTGGATCCGCCACTAAGTTGAGTGAAAATAAATACATCTTTGTTTGCTAAGAATGTT
GAGCACATAGTATCCATACTTGAATCCTATATTCACTAAAGGGTTAGTTATATATGTAAAACATTCAATTATATTATTCTTTTAGAT
AAAACCTTAACTTTAAACATTTGTTTAATAAAATCTTTTCATTTTCTTTCGAATAAGATCCTGGACTTCTTTTAATTTTTTTCTAAAAA
ATATTCATATTTATTTCTTTTTTGAAAAAAAATCTCTTTGTTTATTTCTTTCTAGAAAAACCTTCAACTTATTTTTACGAAATATAAGG
CTAAATTTTTTTCAAAAGAAAATGTCTAAAATTAGAAAATTAAAAATAAACTTGCTAATATAATTAATACAATATATATATATATATAT
TATATATATATATATATATATATATATATATATATATATCATCAGGGACAGGGTCGCAACGAAGAGCAATTTGGAGAAGATGGGAA
TCAGAGCAGGTTCGATCCTATGTGCTTTTTGTAGAAATGCCACTGAAATGGCGAATCATGTGTTTTGTAGCTGCCCATTAAAGAA
ATATGGAATAAAGTGTATGGATGGTGGGGTCAATCATTTGGGGACAAAAATAATGTGGAGGACATACTGGAAGATCTAGTGGCA
AACTCAAGCCACAAAAGAGATGAGAAAGTAAGATTAGTGGTGTGGGCCGCGGTGCTTTCTCAGATTTGGAAGTACCGAAATGAA
GTAATCTTTGAAAATAAAACCAAAACAGTGGAGGAGATTTTCTTAAAAGCCCAAGGTGAAGCAGCCTTGTGGTTGGAAAGTCGG
GCCTCAAAAGTGGAGATAGATAGATTGTCTTGAGCCTTGTCCCCAAACTAGCCTGTAAATTTATGTAACTCGTTGTTTGGCATCC
CAGTTTCTGGCTGGGATTCCTAGTTTGTTTTTAATACAGTTGCCTTTCAAATATATATATATATATATATATATATATATATATATAT
ATATATATATATTATATATATATATATATATATAGAAGTTGGTTTAAACGAGAACAATTATTGAATTTGAGAACGTGAGAACAAATTT
GGGTCACTTATTTTTTATTAATCATATGTGATTTTTCACATACGATTTACATGTATAAAATCATATGTGATTTTTATTAGTCATGTGT
AAATCATATGTGATTATATATGATGTTTTTTAGCATGAAAAATAAGTGGCTTAGATTTGTTCTTGTGTTCTCAAATTCAATAATTATT
CTCATTTGAACCGTCCTATATATATATATATATATATATAATATATATAATATATATATATATATATATATATTTTTATTATATATATAT
ATATATTGAAGCCAGGGAAATTTGGTACAATAGTCGTAATATACTACAGCTACGCTAGTTACATCAGTACTACAGACTCTGATAC
GGACATCCAATGCTTCAAGCTTGTACACCTTCGACGAGGAGACTGCACAGAGACTAGACCATCGTGCGCACCGTTAAACCTGA
TGAATCGCCTCCATCCCGTAAGTTGGCGTCTTCGGGCTAGTGACCACTAGGTAAACCAGCAGCCCCGGGTACACGAAACCTTC
GCTAGCACTGAGGCCTGCAAGAATGAGTAATATCTTTTCAAACTTGCAGCCGGGGAGGATCGAACCCGCGCCTCTCCTAAGAG
CGGCACTTGTCCTTACCATCCGGACCACGGAGGAGTGTGCATATATATATATATATATATATATATATATATATATATATATATATA
TATATATATATATATATATATATATATATATATATATATATATATATAGGGAGAGGTTATAATGAGAAATAAAAAATGGTGAGAACG
CGAGAACGATTCTGGACCAATCAATCTTAAGGATATATTAGTAATTTAATAATTCAATCATTTATTAAATCAAATTAATAAAACCCC
CATAAATTAGGAAATTGGATATTAAAAGATATATTTCGATCCTATAATCTCTCTAAAGATAAATTCAAAGATATTATATTTGACTTC
CATTCTTCCACCTGTTAATTACAGCGACCGAGTTTCTTCTTCCTTCTTCATCGTCGATCAAGAGTTTCTTCTTCCTTCTTCATCATC
GATAAAAAAAAATTAGGGTCAGTGACCGACTTTCTTCTTCCTTCTTCTTCATCATCGATCAAAAAAATTAGGGCCGACAAACCTTC
TTGTTCAATACAAAAGAATTAGGGCCGACTTCTTTCATCTTTCTTCTTGTTCCTCCTGATATCTTCATTAAACCGATAACTAATACA
TATATTTGTAATTGATTAAATACAAGATGGATTTTGCCGATTGAAGGGTTTGATGACCTTGAAAGCACCGAAAATTGTGATTATAG
TGATATGGAAAATCGACATAGAATCGAAGAAGAAGAAACCGAAAGTGATGAAGGTATGTATTAGTAATTTTTATATTTTCATAGTT
GAATGGATGATTGTTAGTATATGTTGTTAATATGCTGTTAACAGAGAGTCGGAACTGTTCTTGAACTGTAATTTGTATACGTCTAG
TTATAATCATTAATGATTATAACTTCCTAAATGTTTTAACGTTATAATCATTGATGATTTCATTCTTCACGTTATAAAACTATAGATA
TATATGTTTAGACTAGTTTAAATCTAGTATTATATTGGTCTATTGTACTTAGTAGTTTGAAAGTTGAATATGTTTATATGTAATGATT
AAAATTATTAAGATTAACGTAGTTTTGATTAAACAGGTAGTCAAAAGCAACGTAACTTCGACTTTAAAGGGATAGAATGTAAAGCA
TTGATTAACCAGAGAATGTGCAAAGGTTGTCGGGAATATGTCGGACATAATTGGGTTCGTCGGTTGTGAGCCTTACTGTTGGTT
CTGAGGGCCACTTTTGGTTTTGTCTTGGGTCCACGTTTATGTCCTGGTCCTGCTGCTTAGTTTTTGACGATTTTGTCCCTGAGGG
TGTATGGTGCTTTGTTTCGAATGTTTGGAGCTGTCCTAGAGCGTTGCTGACATTTTTGACTTTTTTGCCCCTAAGGGTGGAGGTT
CTTTCTTGTTGGTTCGGGTTGATGCTGCTGCAACTATGGTGGGCTTTGCGGATGGGGTTTTTGGACACTTTTACCCCTGTCTGC
TAGGTTGTCTTCTTGGTTGGTCCTTGTGCTGTTTTGAAGTTTTGATGTCTTGTTGCTCTGTTCAGCTTGCTGCTTAGGCGTTCGTT
ATGTGCTGGGTTTCAGGACGTTCTTGCTCCCCTGTTCCTTCCCGGCTTTCTCCCCTTTGGTGCTGGTGATGTCTTGGAGTCTTG
CTGTTTGGGTGCCTTGTTTTTTGCTTGGGGCTGTTTGTGATAGTAGTCGGTTAGGTAGTGTTGGTGTCTTAATGCTGGCATCGGT
TTATTTATTTAATTTGCAGCCGTTAAAAAACATAATTGAGGAACTTGTGAAGTTAGAATTGCAAGCAATGGGACTGATAAGAGCA
GTCAATAGATAATTGAAATTGTTTTTGTTTGAACTTTTATGGTATATGTGAATGAACATAATATATTTGTTTGAATTGAATTATTTAA
ATCATTTTTGTTTTGAAGTCAATTAGTAGACAACACTACATACAAATCAACAAAATATATGAATTATTGAAAGGTGAAACATATATG
AAAACTTAATTATGGATTAGGCTTAATCATTAATGATTAAAACTACAAAAACACAACAACAAATGTAAGCTAATTTGAATTCGCCAA
TGATTTTAACTTATAATCATACGTGATCAAGATTAGTATGTATTTATGTTCAATTGAAATCAACAATGATTTAATTTATAATCATGAA
CGACTTAACTTATAATCATCAATGATTAACTGATTAACTAAGTAATTATCAGAGTGTCTATACTTAGTAGTAGATATATTAAATCTG
TTTATACGTAATGATTTAACAAAATCACATAATACATACTTTTGTTTATTCTATAAAAACTTGTAAATAATATTGATTAAAATGTATAT
GAGTTTACAAACATTACATACAAATTACATTTATTCAGCCATAATCATATTGTGTTGGAAAATCATCAATAATTTAACCTCTAAGCA
TTGACTATAAAAATGTTTAAGAAATTATCAATAATTAACGTTAAAAAATATATAAAGACAACACAAATCATCAATGATTAACACATG
TTGTATTGTTGGGGTATTTTCCTTTGTATTGTCAACTTCAGCTACCTCCGGTTCAGTTTCAGGTTGAGCTTTAGATCTTGAGCTTG
ATTTTTGGATTGAGATTTGGGTCGACTTTTGGATTTCTCTAGTGTAGATTTATTTCCTGTTATTACAAATGTGAACTATGATAAGAA
TTACACATATTAAAAATCATAGATTATTGATTATGTGTATCTAGAGGAACCTGTATTTGTTAATCATTAATGAATAACCAACACATA
TTCATCAATAATTATAGTATGTTATAAATACAGGTCAGAAATGAAAGTTTATGTGTTTCACCTCTCATTACAATCATGATTAACCAA
CACATATTCATCAATGATTTTATTATGTTATAAATTCAAATCATAAATGATAGCTTATGTGTTCCAGTTTACATTTCAAACATCAATT
ATTATAAAACGAGACGAATTCCCGCGCGTTGTGCAAGGAGATTAAAATATGACATAAAAATAAACACTACGTAATTTAGAGTCAA
TTAAGTTAAATTGTTGTAAAATAAATTGGTTATAATTATTGGTAATGGTTTTATTTATTAAAATTAGAATCTTAATTTAAACAATACG
TTTAAATTAACATACATACACAATGTACATGCATATACACTTCATAATATAGTTACATCAAT
SEQIDNO: 402
MWLLNGFLTRNKCAACYKQFNKKEHLVEHMRISYHSVHEPMCGICGKRCRSFESLREHLIGPLPKAECERVFRDRGCTFCLNILSSP
HALRFHQDRCQLSRGNNGVLHRFANLRIHDGLRIENEKTRVVALACKMVGGGSDGSLDLCARICVIDEYENILFHSYVKPQLPVTNYR
YESTGIRPEYLRDAMPIRHVQRKIQDFLCNGEPIWKIRPRSGKARILVGHGLDHDMKCLELEDTSKYPPLMKTSKLSNSLKYLTKAYLG
YDIQNGIQDPYDDCVATMRLYRRMRYQAHRIEDYPLATDPQNKNNFTSWRQGELERMSPDELFAISRSDYYCWCLDSKDVA
SEQIDNO: 403
ATGTGGCTACTAAATGGTTTCTTGACTAGGAACAAGTGTGCAGCATGCTATAAGCAGTTTAACAAAAAGGAGCATCTGGTGGAA
CATATGAGGATTTCGTATCACTCGGTTCATGAACCTATGTGTGGAATTTGTGGGAAACGTTGTCGATCATTTGAATCTCTCCGTG
AACATCTTATAGGACCATTGCCAAAGGCCGAGTGCGAAAGGGTGTTTAGGGACCGTGGATGTACCTTTTGCTTAAACATCCTTA
GCAGCCCGCACGCTCTCAGGTTTCACCAAGATAGATGTCAACTATCGCGTGGAAATAATGGTGTCTTACATCGATTTGCTAACT
TACGCATTCATGATGGCCTGAGAATTGAAAATGAGAAAACAAGAGTAGTTGCTCTTGCCTGCAAAATGGTTGGGGGGGGTAGTG
ATGGTTCTTTAGATCTTTGTGCAAGGATTTGCGTCATTGATGAATATGAAAACATACTATTTCATTCTTATGTCAAGCCACAGCTT
CCTGTTACAAACTACAGGTATGAGAGCACAGGAATTCGACCAGAATACCTCAGGGATGCAATGCCAATAAGACATGTTCAAAGG
AAAATCCAAGATTTTTTATGCAATGGTGAACCGATATGGAAGATCCGGCCAAGAAGTGGGAAGGCAAGGATTCTTGTAGGACAT
GGTCTAGATCATGACATGAAATGCTTGGAACTAGAGGATACATCAAAATATCCACCCTTAATGAAGACTAGCAAGCTCAGCAACT
CTCTCAAGTACCTAACAAAAGCATATCTCGGCTACGATATTCAAAACGGGATACAAGATCCATACGATGATTGTGTTGCAACAAT
GAGACTATACAGAAGAATGAGATATCAAGCTCATAGAATAGAGGACTATCCTCTTGCAACAGACCCCCAAAACAAGAACAATTTT
ACTTCATGGAGACAGGGTGAGCTTGAGAGGATGAGTCCTGATGAACTTTTCGCAATCTCAAGGTCTGATTACTATTGCTGGTGC
TTAGATAGCAAAGACGTGGCTTAA
SEQIDNO: 404
ATGTGGCTACTAAATGGTTTCTTGACTAGGAACAAGTGTGCAGCATGCTATAAGCAGTTTAACAAAAAGGAGCATCTGGTGGAA
CATATGAGGATTTCGTATCACTCGGTTCATGAACCTATGTGTGGAATTTGTGGGAAACGTTGTCGATCATTTGAATCTCTCCGTG
AACATCTTATAGGTATAATACTTTTTCTTATCATTATTATTTATATTTTCTTATCACAACACCTTGATGGATATGTGTGTGTATACTA
ATTACTTCTTCAATTCTTTAGGACCATTGCCAAAGGCCGAGTGCGAAAGGGTGTTTAGGGACCGTGGATGTACCTTTTGCTTAAA
CATCCTTAGCAGCCCGCACGCTCTCAGGTTTCACCAAGATAGATGTCAACTATCGCGTGGAAATAATGTAATCAATTGTATCCTA
AAACTAATTAATATTTTTTTCTTTTTTAGATATATAAATGTACTGAACTATAAGCTTATACCCCTTTTTGTGATTTAATCAATATTCCA
GGGTGTCTTACATCGATTTGCTAACTTACGCATTCATGATGGCCTGAGAATTGAAAATGAGAAAACAAGAGTAGTTGCTCTTGCC
TGCAAAATGGTTGGGGGGGGTAGTGATGGTTCTTTAGATCTTTGTGCAAGGATTTGCGTCATTGATGAATATGAAAACATACTAT
TTCATTCTTATGTCAAGCCACAGCTTCCTGTTACAAACTACAGGTACCTTCTTTTTCACCATCTATTCCTATAGTTTTGAGGGCAC
TACTTACACAAGGGTGGATACGACGGAAACGTCACAAGTTTCCTCAAGTAAGCATGCAAAATTTTGTTTTCAGGTATGAGAGCAC
AGGAATTCGACCAGAATACCTCAGGGATGCAATGCCAATAAGACATGTTCAAAGGAAAATCCAAGATTTTTTATGCAATGGTGAA
CCGATATGGAAGATCCGGCCAAGAAGTGGGAAGGCAAGGATTCTTGTAGGACATGGTCTAGATCATGACATGAAATGCTTGGA
ACTAGAGTATCCTCTTGCAAAAATAAGGCAAGTATCTTCATGTTATTTATCACCTATTTGCGTGATTAACTTAAATATTTATTAATA
ATTTTTCATGCCTCTTTATTACTTTATAGGGATACATCAAAATATCCACCCTTAATGAAGACTAGCAAGCTCAGCAACTCTCTCAA
GTACCTAACAAAAGCATATCTCGGGTAATAATAATGATAATACCACGCTTTAGTAATGTTGAATATCTTTGTTACCCACACATTTTT
AGAGCTAGCTAAAAGATACACATGTTAATGATTAATCGGTTCTTTTACAGCTACGATATTCAAAACGGGATACAAGATCCATACG
ATGATTGTGTTGCAACAATGAGACTATACAGAAGAATGAGATATCAAGCTCATAGAATAGAGGACTATCCTCTTGCAACAGACCC
CCAAAACAAGAACAATTTTACTTCATGGAGACAGGGTGAGCTTGAGAGGATGAGTCCTGATGAACTTTTCGCAATCTCAAGGTC
TGATTACTATTGCTGGTGCTTAGATAGCAAAGACGTGGCTTAA
SEQIDNO: 405
MRTSYHSVHEPICGICGKRSRSFESLREHLIGPLPKAECERVFRERGCDLCLNIFGSRNALRVHRDTCQLSYGYNAVLYRFANLGIQD
DLRIDNGKSRAVALACKMVGGGSDGSLDLCAKICIIDEYENILFRSYVKPYLPVTHYRYETTGIRPEYLRDAMPLRQVQRKIQDFLCNG
EPMWKIRPRGGKARILVGHGLDHDLKCMELEYPAIKLRDTANYPPLMKTSKLSNSLKYLTKAYLGYDIQVGIQDPYEDCVATMRLYRR
MRSQAHRNENYPLASDPQNKNNFASWRQSELERMTPEELLAISRSDFYCWCLDGKDYV
SEQIDNO: 406
ATGAGGACCTCATACCACTCGGTTCATGAGCCCATTTGTGGAATTTGTGGAAAACGCTCTCGATCATTTGAATCTCTTCGAGAAC
ATCTTATAGGACCCTTACCAAAGGCAGAATGTGAAAGGGTGTTTCGCGAGCGTGGTTGTGACTTATGCTTAAACATCTTTGGCA
GTCGCAATGCTCTCAGGGTTCACCGAGATACATGCCAACTATCATATGGATATAATGCTGTACTATACCGATTTGCTAACTTAGG
CATCCAAGATGACCTAAGAATCGATAACGGGAAATCAAGAGCTGTTGCACTTGCTTGCAAGATGGTTGGTGGTGGTAGTGATGG
TTCTTTGGATCTTTGTGCAAAAATTTGCATCATTGATGAATATGAGAATATATTATTCCGGTCCTATGTCAAACCATACCTTCCTGT
TACACACTACAGGTATGAGACAACTGGCATTCGGCCCGAATACCTCAGGGATGCAATGCCACTTAGACAAGTTCAAAGAAAGAT
TCAAGATTTCTTGTGCAATGGAGAACCCATGTGGAAGATCCGCCCAAGAGGTGGGAAAGCAAGGATTCTTGTAGGTCATGGTTT
GGATCATGATCTTAAATGCATGGAGTTGGAGTACCCTGCAATTAAATTAAGAGATACAGCAAACTATCCACCCTTAATGAAGACT
AGCAAGCTCAGCAACTCACTTAAGTATCTTACAAAAGCATACCTCGGGTATGATATTCAAGTTGGGATACAAGATCCTTATGAAG
ATTGCGTTGCAACGATGAGGCTTTACAGGAGGATGAGATCACAGGCTCATAGAAATGAGAACTATCCGCTTGCTTCGGACCCAC
AAAATAAGAATAACTTTGCTTCATGGAGACAAAGTGAGCTTGAGAGGATGACTCCTGAGGAACTGTTGGCAATCTCAAGGTCCG
ATTTCTATTGTTGGTGCCTAGACGGCAAAGACTATGTTTAA
SEQIDNO: 407
ATGAGGACCTCATACCACTCGGTTCATGAGCCCATTTGTGGAATTTGTGGAAAACGCTCTCGATCATTTGAATCTCTTCGAGAAC
ATCTTATAGGTACTGGCTACATGATATAGATTTGTTAAGAGTGATTGCACACCATGAATTTTCACTCACAAATGATCATATCATGT
GTTATAACATGATTTTCTTAGCATCAAGAACATGGCTTACACATACCACTTACTTTTTTTTCACAGGACCCTTACCAAAGGCAGAA
TGTGAAAGGGTGTTTCGCGAGCGTGGTTGTGACTTATGCTTAAACATCTTTGGCAGTCGCAATGCTCTCAGGGTTCACCGAGAT
ACATGCCAACTATCATATGGATATAATGTAATAAATCATCGACCTTGATTGAAAATGCATTTATTTTCTCTGTGTGCTAATCAGGA
AATTAAATCCGCTCCACGCTTATCAATTATTTCAGGCTGTACTATACCGATTTGCTAACTTAGGCATCCAAGATGACCTAAGAATC
GATAACGGGAAATCAAGAGCTGTTGCACTTGCTTGCAAGATGGTTGGTGGTGGTAGTGATGGTTCTTTGGATCTTTGTGCAAAA
ATTTGCATCATTGATGAATATGAGAATATATTATTCCGGTCCTATGTCAAACCATACCTTCCTGTTACACACTACAGGTATTTTATT
CTGCCTTCTTGTACTATATATGTATCTGTGAGTGTGTGTTACTCTATTATGTAAGTATTACACAATAAATTTTGAATTTACATAGGT
ATGAGACAACTGGCATTCGGCCCGAATACCTCAGGGATGCAATGCCACTTAGACAAGTTCAAAGAAAGATTCAAGATTTCTTGT
GCAATGGAGAACCCATGTGGAAGATCCGCCCAAGAGGTGGGAAAGCAAGGATTCTTGTAGGTCATGGTTTGGATCATGATCTT
AAATGCATGGAGTTGGAGTACCCTGCAATTAAATTAAGGCAAGCAAGCTAGCATCTTCTTGTAGACTATCACATGATATAAATAT
GTATGACCATTTATCATGATATATTCTTGATGTTTATAAAGATTTGGTTTTTGTAACATATAGAGATACAGCAAACTATCCACCCTT
AATGAAGACTAGCAAGCTCAGCAACTCACTTAAGTATCTTACAAAAGCATACCTCGGGTAATCTTTGGTAGACCTTGATCATGTT
TATATAGAATTAGTGACTAAAAAGAGCCATAATTTGAAATAATGGATGGACTTTTGATTACACAGGTATGATATTCAAGTTGGGAT
ACAAGATCCTTATGAAGATTGCGTTGCAACGATGAGGCTTTACAGGAGGATGAGATCACAGGCTCATAGAAATGAGAACTATCC
GCTTGCTTCGGACCCACAAAATAAGAATAACTTTGCTTCATGGAGACAAAGTGAGCTTGAGAGGATGACTCCTGAGGAACTGTT
GGCAATCTCAAGGTCCGATTTCTATTGTTGGTGCCTAGACGGCAAAGACTATGTTTAA
SEQIDNO: 408
MDHRYESSETLRNKCSACYRQFNKKEHLVEHMKISYHSVHEPMCGVCRKHCRSFESLREHLIGPLPKAECERIFKDRGCDICLTILAS
RNALRAHRESCQFSLQGLHYRMANLGIQDELRIDNSRGRVVALACKMVGGGSDGSLDLCARVCLIDEHERIIFHSYIKPNLPVTNYRY
ETTGIRPEYLRDAMPVRNVSRKIQEFLCNGEPIWQIRSKGGRSRILVGHGLDHDLKCLEMEYPAIKIRDTAKYPPLMKTSKLSNSLKYL
TKAYLGYDIQIGVQDPYEDCVATMKLYMRMKAQFHKKENYPLATDPQNKNNFASWRQNELERMSPEQLLDFSRSDYYCWCLDTKII
NWRGI
SEQIDNO: 409
CTTCCTCAAATCTTCTCAACTATCTTTCCTCTACTCAAGACTAGAGTTTGAAGAATCTACCACAATTCTACTATAATGGATCATAG
ATATGAGTCCTCCGAGACTCTCAGGAATAAGTGTTCAGCATGCTATAGGCAGTTCAACAAAAAGGAACATCTAGTGGAACACAT
GAAGATATCCTATCATTCAGTTCATGAGCCCATGTGTGGAGTTTGCAGAAAGCATTGCCGTTCTTTTGAATCTTTAAGGGAGCAT
CTTATCGGGCCACTTCCAAAGGCAGAATGTGAAAGAATTTTCAAGGATCGAGGATGTGATATTTGTTTGACAATCCTAGCTAGCC
GGAATGCTCTACGGGCTCATAGAGAATCATGCCAATTCTCTTTGCAGGGATTGCATTATCGCATGGCTAATTTGGGCATTCAAG
ATGAACTAAGGATTGATAATAGCCGAGGAAGAGTAGTTGCACTTGCTTGCAAAATGGTTGGTGGTGGCAGTGATGGCTCTTTGG
ATCTCTGTGCAAGGGTTTGTCTCATTGATGAGCATGAGAGGATCATCTTCCATTCATATATCAAACCAAACCTTCCTGTCACTAA
CTACAGGTATGAAACCACAGGCATAAGACCAGAATATTTGAGGGATGCAATGCCAGTGAGAAATGTGTCAAGAAAAATACAAGA
GTTTCTTTGCAATGGAGAACCTATATGGCAAATCCGTTCTAAAGGAGGAAGGTCTAGGATTCTTGTTGGCCATGGTTTGGATCAT
GATCTTAAATGTCTGGAGATGGAGTATCCTGCAATAAAGATCAGGGATACAGCAAAATACCCTCCACTGATGAAAACAAGCAAG
CTCAGCAACTCTCTCAAATACTTGACCAAAGCTTACCTAGGGTATGATATTCAAATTGGAGTACAAGATCCCTATGAAGACTGTG
TAGCCACAATGAAACTCTACATGCGAATGAAAGCACAATTTCACAAGAAAGAGAACTACCCTCTTGCTACAGATCCACAAAACAA
AAATAACTTTGCATCATGGAGGCAAAATGAACTTGAGAGGATGAGTCCAGAGCAGCTGTTAGATTTCTCAAGGTCTGATTATTAT
TGTTGGTGTTTGGACACAAAGATAATTAATTGGAGAGGTATATGATGAAGAAAGATAGAGAGAAAAGCAACAAGATTTGATATAT
ATATGTTTTGAATTCT
SEQIDNO: 410
TGATTTTTTAAACACAAATACACTGTCTGTCACCTCCTTCTCTAAATCCGCTCGATATCAGACAAACAGGTCGGTAATTATAAATG
AGATTTAAGTCAGGTTTTTGTAAAATAATGATTTTTGAGGTCTTACTTAACGCCAAGACTTTCAAAAAGTGTCTTCAAAGAGACCT
GTATAAATACCTTGCACACCCTCACCTTCTTCCTCAAATCTTCTCAACTATCTTTCCTCTACTCAAGACTAGAGTTTGAAGAATCT
ACCACAATTCTACTATAATGGATCATAGATATGAGTCCTCCGAGACTCTCAGGTACTTAAACTAATACCGTTAATTATTTTCGTTG
AAATTGTGTGACCATGAAAACGCATCTCGTCTATAAGTTTAAACTGTTAGATAGGATGTATAACACACTTTTATTTTATTATGTCTT
TTGACAATTTTTGCAGGAATAAGTGTTCAGCATGCTATAGGCAGTTCAACAAAAAGGAACATCTAGTGGAACACATGAAGATATC
CTATCATTCAGTTCATGAGCCCATGTGTGGAGTTTGCAGAAAGCATTGCCGTTCTTTTGAATCTTTAAGGGAGCATCTTATCGGT
ACATATACCCAAATCTTTCTCAAAAACATGTTAACTTTAATTATCAGTCTACCAATTTATTGGTCATGAATTCTAATTTGTTTGTTTG
ATCAGGGCCACTTCCAAAGGCAGAATGTGAAAGAATTTTCAAGGATCGAGGATGTGATATTTGTTTGACAATCCTAGCTAGCCG
GAATGCTCTACGGGCTCATAGAGAATCATGCCAATCGCGTCCAAATAACGTATGTGTAATAAAACTGTAGAACTATATGATCATT
TCATCTGAAAGTTTAAGGTGTCGGATTTGAAAAGATTAAGCTATCATAAAGAACATTCATTAAAATATTTAAATATGTCTTAAACAA
ACATGTGTGATAACACATGAAGCTATGTTGATTCTCTTTGCAGGGATTGCATTATCGCATGGCTAATTTGGGCATTCAAGATGAA
CTAAGGATTGATAATAGCCGAGGAAGAGTAGTTGCACTTGCTTGCAAAATGGTTGGTGGTGGCAGTGATGGCTCTTTGGATCTC
TGTGCAAGGGTTTGTCTCATTGATGAGCATGAGAGGATCATCTTCCATTCATATATCAAACCAAACCTTCCTGTCACTAACTACA
GGTAATTATTCGAATGATTTAAGTTATATATACTGACAGTCTGTTACACGTACGTTTTAATATGCGATAGCATAAACTTTATTTGTA
ATTATATGAAATATGTGTTTAGGTATGAAACCACAGGCATAAGACCAGAATATTTGAGGGATGCAATGCCAGTGAGAAATGTGTC
AAGAAAAATACAAGAGTTTCTTTGCAATGGAGAACCTATATGGCAAATCCGTTCTAAAGGAGGAAGGTCTAGGATTCTTGTTGGC
CATGGTTTGGATCATGATCTTAAATGTCTGGAGATGGAGTATCCTGCAATAAAGATCAGGTAAACTCTTTGATCCACTCTTTAAA
GACAATTTTATGACTTTATTGTTATAAGTAATACTCCCTCTGTTCCAATTTATGTAGCAGCATTTCCTTTTTAGTCTGTTCCAAAAA
GAACGGCAACATTCTAAATTTGATAACTATTTAACTTCAAAATTACAATTTTGTCATTTTGTCATTGATGAATATAATTCGACCTTCT
TGGTTAGTACTTTCATACTTATAATTATAGAGTTGGTTCTTACTTTTTGTTCAACTTATTTTCTTCTCAAGGGATACAGCAAAATAC
CCTCCACTGATGAAAACAAGCAAGCTCAGCAACTCTCTCAAATACTTGACCAAAGCTTACCTAGGGTAATTGCATAAAACTTTAT
ACTTTTCTTGTCCCCACTAGTAAATAATTTATCGCAACTTTAGAATCTAAGAAAATAAATGGTCATATTAAAATTGTGTAGGTATGA
TATTCAAATTGGAGTACAAGATCCCTATGAAGACTGTGTAGCCACAATGAAACTCTACATGCGAATGAAAGCACAATTTCACAAG
AAAGAGAACTACCCTCTTGCTACAGATCCACAAAACAAAAATAACTTTGCATCATGGAGGCAAAATGAACTTGAGAGGATGAGTC
CAGAGCAGCTGTTAGATTTCTCAAGGTCTGATTATTATTGTTGGTGTTTGGACACACAAGATAATTAATTGGAGAGGTATATGAT
GAAGAAAGATAGAGAGAAAAGCAACAAGATTTGATATATATATGTTTTGAATTCTTAGTCGTAGATATCAAGAATTCAAATGATAT
TCATGAAAGCCAAAATTTAGTACGTAGTATATATTTATTTGCATGTCTACTTTGTAATAGATATAGTTGAAATAAAGATGATTTTCA
CTTGCTACAATGAGTGGGTCAAAGTTTTTTACATGCATAGAAGTTTAACTTTTCTGCCATGCATATATGTGCTCTAC
SEQIDNO: 411
AAAGGTACCCGTGACAGCCGAAGTCAATGAAAGAAAAGAGAAATAATGGGCCCAAGAATCTGGAACATACATAGATCATTACGA
ATGCAATAATGCTATACGCTACCAACAAACTGCACGACAAGATAGAGGAGAGGAAGCATGGCCAAAGAAAAAGAAAAAAGTAGA
GGAGGAATCGGAAATTAATATACTGAATATTGCCTTTAGGAATCGTCCATTTATGCAAGTTGGAGCAATAGTACCTCTACCCTTT
CCCTATAAATATCACCCCACTCCTACCTTTGCGAATATTTTGTATGTTCAGTGAAAGTAAAACAAATTAAATTAACAAGAAACTTAT
AGAAGAAAATTTTTACTATTTAAGAGAAAGAAAAAAATCTATCATTTAATCTGAGTCCTAAAAACTGTTATACTTAACAGTTAACGC
ATGATTTGATGGAGGAGCCATAGATGCAATTCAATCAAACTGAAATTTCTGCAAGAATCTCAAACACGGAGATCTCAAAGTTTGA
AAGAAAATTTATTTCTTCGACTCAAAACAAACTTACGAAATTTAGGTAGAACTTATATACATTATATTGTAATTTTTTGTAACAAAAT
GTTTTTATTATTATTATAGAATTTTACTGGTTAAATTAAAAATGAATAGAAAAGGTGAATTAAGAGGAGAGAGGAGGTAAACATTTT
CTTCTATTTTTTCATATTTTCAGGATAAATTATTGTAAAAGTTTACAAGATTTCCATTTGACTAGTGTAAATGAGGAATATTCTCTAG
TAAGATCATTATTTCATCTACTTCTTTTATCTTCTACCAGTAGAGGAATAAACAATATTTAGCTCCTTTGTAAATACAAATTAATTTT
CGTTCTTGACATCATTCAATTTTAATTTTACGTATAAAATAAAAGATCATACCTATTAGAACGATTAAGGAGAAATACAATTCGAAT
GAGAAGGATGTGCCGTTTGTTATAATAAACAGCCACACGACGTAAACGTAAAATGACCACATGATGGGCCAATAGACATGGACC
GACTACTAATAATAGTAAGTTACATTTTAGGATGGAATAAATATCATACCGACATCAGTTTGAAAGAAAAGGGAAAAAAAGAAAAA
ATAAATAAAAGATATACTACCGACATGAGTTCCAAAAAGCAAGAAAAAAGATCAAGCCGACACAGACACGCGTAGAGAGCAAAA
TGACTTTGACGTCACACCACGAAGACAGACGCTTCATACGTGTCCCTTTATCTCTCTCAGTCTCTCTATAAACTTAGTGAGACCC
TCCTCTGTTTTACTCACAAATATGCAAACTAGAAAACAATCATCAGGAATAAAGGGTTTGATTACTTCTATTGGAAAACCTCAAGT
CCAAGTCTTTTCTATTCTATTTCTTACGTAATAATTATATAGATTAGTATAAAGAACTATGGATTGCAGAATAGAGAGTGCCGAAA
CTCACAGGTTTTCTTAATTTCTTACATCCATGCACAAGCGCACACATGCATACATCACATATGAACGAGTGCATGTGCTTCTATA
CTATTAAACATTGAATTGCATAAAATTAAAAATGAATTATAATCAACAGTGCATGGATATGTATAAATAACAATCATGTTTTTTTTTT
TTTTTTTTGCAATAGGAATAAGTGTGCAGCATGCTTCCGACAGTTCAACAAACTGGAGCATCTTGTGGAGCACAGAATTCTTT
SEQIDNO: 412
GGTACCcgtgacagccgaagtcaatgaaagaaaagagaaataatgggcccaagaatctggaacatacatagatcattacgaatgcaataatgctatacgctaccaacaaactgca
cgacaagatagaggagaggaagcatggccaaagaaaaagaaaaaagtagaggaggaatcggaaattaatatactgaatattgcctttaggaatcgtccatttatgcaagttggagcaa
tagtacctctaccctttccctataaatatcaccccactcctacctttgGGCCTTTGTTTATGCTAAGTGGGATGCTAAAAGTCATCCAAACGGATAAATTGC
TTTTTATTTAAATTTTAAAAATTAAAACTTCTAAGTTTTTGAATTTTAAAATTAATTAACCAAAGTCTTAATTAAAACTGTCCATTAAT
TTAAATTTTAAGAATTTACCAAAATTGTCAACTAAAACCGTACAATTTTTTAATTTTAAAAAATGTGTGAATTTGTTAACTATTTTTTT
AACTTTTAACAATCTACCAATTTGTTAATTTTTAAAAATATACCAATTTATTAGTGCTTATTTTTTAAATTGTAAAATCCTAGCAATTT
GTTAATTAAACCAACGTAAACTAAACAATTGTTATTTAAAAAAAAATATTTTTTTTTAATTTTAAAATTCAAACTATTCCAATTTTCTA
TTGGCTTTTTCTTATACTGTCCAAATTTTATTTTAATTTTAATAAAATAACAATTAACTACAAACCAAATTTTTAAACAATTATTAAGA
GATTCATATTTGTTAATGATTGTATCGGATAAAATAAATTTTTTAACCTTTTTAAAAATCAACATCGTAAATTAATTATTATTATTTAG
AAATAAAAATATCTTTTTAAATTTAAGATTTTATTCCATCCCACAATTTTCTTAGTTTTTTCTTAGATAAATCAGTATTACTTAAATAT
TATCATTTTTTTTTTAAAATACCAAACTATCCCACTACTTCCTTTAATTTTATTTTTATCCTAAAAAAACTTAAAATGTGTTTTTTTTA
AAGAAATATAAAAAATATTTTTCCAACAATAAAATAAATATAAGCTAATGCCTTTTTTTTTAATTTATATAAAATATAATACAAATATG
GATATACGGGCGGGCAGAGCGGCTGTGTTTCCGCTAGTTTTAATAACAGCCTTCCAATTTATTACTTGTATATCATATGGCTATC
AAAACTTGTGCACCGTGTGTGACTACGCTACTTCTACACCCTATAATCCGTCTCCGTCTCCAACTTAAGAAAAAAAAAAAACTAC
AACCTTTATTTTATTTTTCTAATAGTAAAAAATTGTAAATATGGAACAGCAGTGGGCCGCAATAGAACGGGCCCATTGTCCAGAA
AAAAATTGCGAAAATCTTCACCCGTCACCCTTTTTCATTTCATCAAATCCCTCGTTTTCCTTTCCTTTATTCCTATTTCCCACACTT
CTTCTTTCATCATTCATCGCCTTTCACCACGCACGCAGATCCTTTATTCCTATAATCCTTCCTTCGCTCTCTCCAAATTTCGACTC
TTTCGATCAGATCCGCGACACCCACCCCACCAAAACCTTGCGCAACCCATCacctcaagtccaagtcttttctattctatttcttacgtaataattatatagatt
agtataaagaactatggattgcagaatagagagtgccgaaactcacaggttttcttaatttcttacatccatgcacaagcgcacacatgcatacatcacatatgaacgagtgcatgtgcttcta
tactattaaacattgaattgcataaaattaaaaatgaattataatcaacagtgcatggatatgtataaataacaatcatgttttttttttttttttttgcaataggaataagtgtgcagcatgcttccgac
agttcaacaaactggagcatcttgtggagcacaGAATTC
SEQIDNO: 413
TAATTGAAATTTTGATTTTCCTGCACTTTTAAATTCCTGACTTTGTTTTTTATATTTTTAAATTAAGATATTTAATTCTTCAATTTATTA
AAATAAATAATTTTGATGGATCATTAATTTTATCAATTAATTGTTAGTTAATCATTTAAAGTCAAACATTAATGTGACATATTAATAA
TACTTATATAATTACATAAGTTGTTGACATGACACTTAAGTGACAAGAAATAAAATAAAATAAAATAAATAAAAAAAGATTTTGATA
AATATTAAACTCACATTTTATACAAAGATAAGATAATAAATAATTAGGACACTTGTATTATTAGACTTATTTTATTTAGTTAACTTTA
TAAATATTAGTTTCTATATATTATTAGTCAAGAATTATTAATCTTTTTTCAAATTATAAAAATTTATAAATTAAAAAAATTAATATATAA
ATATTTTTCATTTTATTTTATATAATTTTATACATTTTATTTTAATTTTACCAATTTATAATTATATTTCACAAATTAATTTATAAATTAT
TTACATAAATTATTTTGTAAATTATTTACATAACTTATTTTGTAAATTATTTTAATATACATATTATTTTTATTCAAATTATATAAATCA
ATATAATTGTGTTAATTAATATTTAAATTATACAAATTACTTAAACTTATTTTACTATGAAAATATTTTTATTCTAAATATTTAAATTAA
AAAATAATATTTAATTTTTTAGAAAACTTACCTATTAATATTTTAGTGTTCACTATAAGAAGTTATTTAATTTATTAAATAAGTTATTT
TAAAATCAATTATATAAATCCAGAAAATTACATAAATAAATATGTAAATTATTTATATAAATTATTTTATCTAATTTATAGAAAATTTG
TAATTTTATTTTTATATATAAATAATAATTTTTTATTATTTTAATTAAAAAATTATAAATTTTGAACTTTCTAGATTATTTAAATATTATT
TAAAATTTACTCATAATCTATATATTATTTTTAAAATTATAGTAAAATAAGAACAAATTTTTATATAATAATATTTATTCATTTATATTA
AAATAAAATTTTATAAAAAAAAATAAATACATGTAAAATTAAATATTAAATATTTTATTTTAATTTATAAATTGTCATAATTTAATAACT
AATGGGACATATAAAATAGTGTTTATAAAATTAATTAGGCAAAACAAAAATTTTAGTGATATATTGGTTTACCTTTAAATAAGAGGA
TATGAATTAAACTTCTAACCGAATTTATTTTATTTTTTACTTTTATTTAATTCTTTGTTAGATGATATCATGTCAACAAACTCTATAAA
CTTTACCTTAACTTCACTGCACCACATAAACTTTGGATGGTTGAAAGAATCAAAATTGTTAATTCACGCGCGAGAATAACAAGACT
AAATATCTTATTTAGAAATATGGAATCAATTTAGTCTTTTCTTTGTTTTTTTAGTAGGGGAGGGGGGGCATTTATGGACGAGAGTT
TATGGTTGGTTTGTTTGCAACAATATTATGAAATTCATATTAAAACAACGTGACAGCCGAAGTCAATGAAAGAAAAGAGAAATAAT
GGGCCCAAGAATCTGGAACATACATAGATCATTACGAATGCAATAATGCTATACGCTACCAACAAACTGCACGACAAGATAGAG
GAGAGGAAGCATGGCCAAAGAAAAAGAAAAAAGTAGAGGAGGAATCGGAAATTAATATACTGAATATTGCCTTTAGGAATCGTC
CATTTATGCAAGTTGGAGCAATAGTACCTCTACCCTTTCCCTATAAATATCACCCCACTCCTACCTTTGACCTCAAGTCCAAGTCT
TTTCTATTCTATTTCTTACGTAATAATTATATAGATTAGTATAAAGAACT
SEQIDNO: 414
ATCTCTCGACAGTTGCGAACTGAATGCTTAGTTGGTAATGTTATGCCCTATCGCTTTTTGCACCGTCCCATGCATCATTACCCCC
ACACACCTCCATCAACCTCTAAAAAGTTAAGAGTGAAAATTACACACACCCGAGGAGAAGAAAAGCTGCTTCTTCTAAGCAACAC
GACCTAGTTACTTTACTTGTAGGGCCTTTCCCTTTTTCCTAAATTACCCCTCTTTTCATCATATGATAATAATATCCAGCTCAGACT
ATAGAATGATATTATGATAGCATTATAGAGTTGACACTAAAGAGCATTATACATGTTGCACCTGACATTCAAGTTCATAAATACTA
ACACTATGCAATAGATAACATATCCTCAAATAAATGCCACACGTTTGGGTGCTCAAATAACCTCAAAAAGGTTAATAGGATGGGA
TTTAAGAGTCAAGGAATATACCATAGATTTTAACTGTTTTTAAAAATGTATTGTTAAATCTTCAATTATTATTAAATGAGACCCATTA
TAGAAATAAGGAACATAAATTTAGGTTCACCAAACAAAATTAGTACTTAAAAAAATGACACCAATTTAATAATTTAATCAAATAAAA
TGACATTTATTTAATTCATCAATAATAAAAAGTACCGTAATATTATTAAATGTTCAATTAATAGTGTTATCATAATCTGTACATAAAA
AGCAATCACTTTTCTATATAATTGAGAGATTAAATTAATATTTGTTTAAACTATCACTGAATCCATTTACCGACCTTTTATATGCCAT
TTTTTATATATATTTGTATGCTTTAAAATCACGGAAAAAAAATTATAGAAAATTCTAACATGATCATTTCAATCATCAATTTAAACAA
CTCTAAATCGAAAACATTGAATAAACTAGAAATGATACCTGGGAATTTGGAACAAGAGACATTCCGCAAAAGAAAAAATATGTTG
AATAATTGAAACGGTGACAAGAAAAGAGGAATAATGAAAATCAATAAAACAGAGATGGGGGGTTATTGTTATTCGAGGAGACGA
GTGAAATGAGTGAGTGAGGGGGGTGTAACTGGAAAGCAAGAAAAAGCACAAGAGTGCCAGCTATTTCCAACAACAAACGTGGC
CCGTGGATGCGATATTGGTAACGGACGGCGAGGATGGAAGGACGTGCAATTTGCGCTTCATTTGAGGCGAATTTCATTTGACC
AGACCTTTCTTTTTTAAACCACAGGGCGGGTACCTCAGCCACACACATACATCATCAAAAAACACACACGACACACTCCCATACA
CACACGTTGTCTCGCACACATTCCTTCATTCCGCAGGTATAGCCACGTTCTCTCTTCCCTCTTTCATCCCCGGTGATAAGAACAA
GCACCCACCGTTTAACGCTAATTTTATGTGTTTTTGTTTTTTTTTTTTTTTTGCAGCAGCAAACATCTTTACCTTAAACGACAACA
SEQIDNO: 415
GAAACAATGCCTAAACATTGTACTAAAATTCACATCAAGCAAAATACAATTTGGTGAACATTAATTGTACCATAAAACATCTATGTT
TGAATAAAGATATACATCCTCAACCTAAATTTACAAGCTAATATAAAATAATAAAATAAAAAACAAATACATAAAACTGCATAAACG
TCTCTTAATCTCGATCGTGTGAGTAAAATGGAACATGTATAAATGTTACATGTTATCCTCACTATCATTCGCTATGACTAATAGTC
TAATACTAATACTAATAATGATAATAATGCTTGTTTTTAAAAATAGTAATAATAAAACAAGTTCACAAGTTAGGTCAATGAGTGCAT
AAATGAAAACCTGTGACCCAAATCCAAAGTCAACGAATTTGAGGATTTTGCTTCTTGCATTTCTTTTTTTTTTCTTCCTGCACTTCC
AAAAATACTCGAATGGACACAACTACCCTTACAAGCACCAACCAAAATTCAACACAAATCGATAACGCCTACTCCCACCAAAATG
GAAACCATTTTCACCAACAACAACAAGGTTCGAAAGGTAGTAACAAGGAAGAGAAAAGGAAAAGGGTTGCAATGGAGATGTCCG
AAGTAGAAGAATAAAACACTATCAATGTAACCCACTACTTTGTTCTTGCTAACATGCATCAACAAACTAAACTAAATGCAATGTAC
AATACATGGCAAAAAATAATGTCAAATCATAAGAAATTCAAGCACAAATATTGCCCTAAAAATTAAATTCAACAAAGAAGTTTCTAT
ATTGCAGTAATAATTTTTCACTTTGCCCCCTCCTCTTAGACTATGCGCGGTGGACCAAAGCTAAAGTTAGAAGGGCTAGGCAAG
ACAAAAGCATTATGTTGAGGTCCCAAATTAGGATAAAAGGAAAAGTGAGAAGGAAGCAAGGAGTGTCACCCTATTTTGAAGCAG
CTATTATGGAATGTGAAAATTAGATTAAGAAATATGTATTCTGGAATAGGTTTATAGATTTCTTATCTTTATTCACTAATAACTATTT
CAAAATGTAAAAATTATATATTTATCTAAACCCACTAGATACTCAATCCAAACTAATTGACTTGATTAAGACGGAATTTGAATTCGT
GGGAAATTCATACTAGGTTTGGGGCAAGGGGTGGAATAAGAAGAAAAAAATGGATAAGGATGTCATTTGGTGTGGGTATATAGG
CAACCAGAAAAGGGCTGGGTATTTTTGAGTGTGTGAGAGAGCGAGCGAGCGAGCAGTTTCAAAGAGAGGATTTGGGATTGGGA
AGGCGAGGGATTGCGCTGCGTCTCTTCCTCTTCTCTTTCGATTCATCCCTCATTCATAATTTTCCAATCCAACAACCTCAGCCTC
ATACTCACACATACACACGTCTCTCTCTCTCTACTCTTTTTTCCTCTCTATTTCCCTTTTCACTTTCTCTTTCATTTCTAGGGTTCC
GTTCTGATCCCTCTTTCCCTTTCAGATCTGAA
SEQIDNO: 416
ATGGCGTCTTCGTCGTTCTCAGTCACATCTCCAGCTGCTGCTGCTTCCGTCTATGCAGTCACTCAAACCTCCTCGCACTTCCCA
ATCCAAAACCGCTCTCGCAGAGTTTCTTTCCGTCTCTCTGCTAAGCCCAAACTTCGCTTTCTCTCCAAGCCTAGTCGCAGTAGCT
ACCCTGTGGTGAAAGCA
SEQIDNO: 417
MASSSFSVTSPAAAASVYAVTQTSSHFPIQNRSRRVSFRLSAKPKLRFLSKPSRSSYPVVKAG
SEQIDNO: 418
MASSSFSVTSPAAAASVYAVTQTSSHFPIQNRSRRVSFRLSAKPKLRFLSKPSRSSYPVVKAGMLHGASSRPATARKSSGLSGTVRI
PGDKSISHRSFMFGGLASGETRITGLLEGEDVINTGKAMQAMGARIRKEGDTWIIDGVGNGGLLAPEAPLDFGNAATGCRLTMGLVG
VYDFDSTFIGDASLTKRPMGRVLNPLREMGVQVKSEDGDRLPVTLRGPKTPTPITYRVPMASAQVKSAVLLAGLNTPGITTVIEPIMTR
DHTEKMLQGFGANLTVETDADGVRTIRLEGRGKLTGQVIDVPGDPSSTAFPLVAALLVPGSDVTILNVLMNPTRTGLILTLQEMGADIE
VINPRLAGGEDVADLRVRSSTLKGVTVPEDRAPSMIDEYPILAVAAAFAEGATVMNGLEELRVKESDRLSAVANGLKLNGVDCDEGET
SLVVRGRPDGKGLGNASGAAVATHLDHRIAMSFLVMGLVSENPVTVDDATMIATSFPEFMDLMAGLGAKIELSDTKAA
SEQIDNO: 419
GATATCATCTTCTCTCTCTCTTTCTGAAGTGAACTGTTGTTGTTGTGCTCTTTGGTTTCATCGAGAGAGAACCTAAACCCGATCTG
AACCAATAACAATAAGAAGACGA
SEQIDNO: 420
ACAATAAACTCTGTTTTTTCTTCTGATCCAAGCATATCTGTTTCCATTTTTCTTGTCTCTGTAATATTATTAGAAACCGAGAGTGTT
TGTTTGCGTGTAACTGAACTGAGCGAGTTTTGAGATGCAATCATTTGAGTTCGATTGAGAGAAATGAATGTGTAGGGCCCA
SEQIDNO: 421
GATATCATCTTCTCTCTCTCTTTCTGAAGTGAACTGTTGTTGTTGTGCTCTTTGGTTTCATCGAGAGAGAACCTAAACCCGATCTG
AACCAATAACAATAAGAAGACGAATGGCGTCTTCGTCGTTCTCAGTCACATCTCCAGCTGCTGCTGCTTCCGTCTATGCAGTCA
CTCAAACCTCCTCGCACTTCCCAATCCAAAACCGCTCTCGCAGAGTTTCTTTCCGTCTCTCTGCTAAGCCCAAACTTCGCTTTCT
CTCCAAGCCTAGTCGCAGTAGCTACCCTGTGGTGAAAGCAGGCATGCTTCATGGTGCAAGCAGCCGTCCAGCAACCGCTCGCA
AATCCTCTGGACTTTCTGGAACCGTTCGCATTCCAGGAGACAAGTCTATCTCTCATCGTTCTTTCATGTTCGGAGGTCTCGCTAG
TGGTGAAACTCGTATCACTGGACTTCTGGAAGGTGAGGACGTTATTAATACTGGTAAGGCAATGCAAGCTATGGGTGCTAGAAT
CCGTAAGGAAGGAGACACCTGGATCATTGATGGAGTTGGTAATGGAGGTCTTCTTGCACCTGAGGCACCACTCGATTTCGGTA
ATGCTGCTACAGGATGCCGTCTTACCATGGGACTTGTTGGTGTTTACGATTTCGACAGCACCTTCATTGGAGATGCATCTCTCA
CAAAGCGTCCTATGGGACGAGTGTTGAACCCACTTCGTGAAATGGGAGTGCAGGTGAAATCTGAAGACGGTGACCGTCTTCCA
GTTACCTTGCGTGGACCTAAGACTCCTACTCCAATCACCTACCGTGTGCCAATGGCATCTGCACAGGTGAAGTCAGCTGTGCTG
CTCGCAGGTCTCAACACTCCAGGTATCACTACAGTCATCGAGCCTATCATGACTCGTGATCATACTGAAAAGATGCTGCAGGGA
TTTGGAGCTAACCTTACCGTTGAGACTGATGCTGACGGAGTGCGCACCATCCGTCTGGAAGGTCGTGGTAAGCTCACCGGTCA
AGTCATCGACGTGCCTGGAGACCCATCCTCTACTGCATTCCCACTGGTTGCAGCTCTGCTTGTTCCAGGCTCCGACGTCACCAT
CCTCAACGTGCTGATGAACCCTACTCGCACTGGACTCATCCTGACTCTGCAGGAAATGGGTGCTGACATCGAAGTCATCAACC
CTCGTCTTGCAGGAGGTGAAGACGTGGCTGACCTGCGCGTTCGCTCATCCACTCTGAAGGGTGTCACAGTGCCTGAAGACCG
CGCTCCTTCTATGATCGACGAATATCCTATTCTCGCTGTTGCAGCTGCCTTCGCTGAAGGTGCTACCGTGATGAACGGTCTGGA
AGAACTTCGCGTCAAGGAAAGCGACCGTCTCTCAGCTGTCGCCAATGGTCTCAAGCTCAATGGAGTGGATTGCGATGAGGGTG
AGACTTCACTCGTCGTGCGTGGACGTCCTGACGGTAAGGGACTCGGTAACGCATCTGGAGCTGCAGTCGCTACCCATCTCGAT
CACCGCATCGCTATGAGCTTCCTCGTCATGGGACTCGTGTCTGAAAACCCTGTCACAGTGGACGATGCCACGATGATCGCCAC
GAGCTTCCCAGAGTTCATGGACCTGATGGCTGGACTTGGAGCTAAGATCGAACTCTCCGATACGAAGGCTGCCTGATGAACAA
TAAACTCTGTTTTTTCTTCTGATCCAAGCATATCTGTTTCCATTTTTCTTGTCTCTGTAATATTATTAGAAACCGAGAGTGTTTGTTT
GCGTGTAACTGAACTGAGCGAGTTTTGAGATGCAATCATTTGAGTTCGATTGAGAGAAATGAATGTGTA
SEQIDNO: 422
TCAAAAAAATTTCTGGTTATGCATCTCTTTCTTGAAAAAATAATCATATAATCACATCAAAAAGAGTCAATTATCATCTTCATTATCT
TAATATAATCAATCAATAATTCAATTTAAAAGGTAAATTAAAGTAAGCAATGTAGACCCAAAAAAAAAAGTCTGCTTTTGTTTCAAA
ACATATAAGGACAGTGAAAGGGTTTGTGCATAAATGTTGTTGCTTCATCTTTCTCATAACATTAGCTATGAGATTATGAAAGTGAA
GATATAAAACAAACACCTAAAAGTGAAAAGTACAAGACACCAAATCCTTCATTTTCATCTCTTACACAACCACACTAAGTTACCAA
AAAACAGAATCTGTTCTTTTTTTGCCTTCTTGCAGATTTCTTCAGAGTCAAAGACACATAAAGATTTATAATTGAGTTGTGAGTTTT
GGAGGCCATGGACGTAGGAGAGAGCAATGAGAGGGTAAAAGACGATTCTGCCCTTCAAGCTTCACCGAGGAGTCCTCTGAGTT
CTATAGATCTTGCAATTGATGGAGCTATGAATGCTTCTATTGAGCAGTTGTATCATAACGTTTGTGAAATGGAGAGTTCTGATGAT
CAGTCTCCGTCCAGGGCGAGTTTTATTTCGTATGGAGCTGAATCTAGGATTGATTTGGAGTTGAGGCATTTGGTTGGAGATGTA
GGAGAAGAAGGAGAGAGCAAGAAAGAGATTATCTTGGAGAAGAAGGAAGAAAGTAATGGAGAAGGTAGCTTGAGTCAGAAGAA
ACCTCTTTCGAATGGTAAGAAGGTTGCGAAAACGAGTCCTAATAATCCGAAGATGCCGGGTTCGAGGATCTCTTCGAGGAAATC
ACCGGATTTGGGGAAGGTTTCTGTTGATGAGGAGAGTCCTGAGCTTGGTGTGGTGTTGTTGAAGCAAGCCAGAGAGTTGGTTT
CTTCAGGTGAGAATTTAAACAAGGCTCTTGATTTAGCGTTGAGAGCGGTGAAAGTGTTTGAGAAATGTGGGGAAGGAGAGAAAC
AACTTGGGTTGAATTTGGTGATGTCTTTGCATATCTTGGCAGCGATATATGCAGGGTTAGGGAGATACAATGACGCTGTGCCTG
TTCTTGAACGTTCTATCGAGATACCGATGATTGAAGATGGTGAGGATCACGCGTTGGCGAAATTTGCAGGGTGTATGCAGCTTG
GTGACATGTATGGTTTGATGGGTCAAGTTGAAAATTCGATTATGCTATACACCGCGGGTTTGGAGATTCAAAGACAAGTTCTTGG
AGAATCGGATGCACGAGTTGGCGAAACTTGTAGGTACTTAGCGGAAGCTCATGTTCAAGCAATGCAGTTTGAAGAAGCCTCAAG
GCTTTGTCAAATGGCATTGGACATTCACAAAGAAAACGGTGCTGCCGCTACAGCTTCTATTGAAGAAGCTGCGGATAGAAAACT
GATGGGACTTATCTGCGATGCGAAAGGTGATTATGAAGTTGCGCTTGAGCATTATGTTTTAGCGAGCATGGCAATGTCATCTCA
GAACCATAGAGAAGATGTTGCTGCTGTAGATTGCAGTATTGGTGATGCTTACATGTCGCTAGCTAGGTTTGATGAAGCGATATT
CGCATACCAGAAGGCTTTAGCTGTGTTTAAGCAAGGAAAAGGTGAGACTCATTCCTCTGTTGCTTTGGTTTACGTTAGGCTTGCT
GACTTGTACAACAAGATTGGGAAAACACGCGATTCCAAATCGTACTGCGAAAACGCTCTCAAGATTTACCTAAAACCGACTCCA
GGAACTCCTATGGAAGAGGTTGCGACTGGTTTTATAGAGATTTCTGCGATATATCAGTCAATGAATGAACTTGATCAAGCTCTTA
AGTTGTTGAGACGGGCGTTGAAGATATATGCAAACGCTCCAGGTCAACAGAACACGATTGCAGGTATTGAAGCTCAAATGGGT
GTGGTTACTTATATGATGGGAAATTACTCCGAGTCCTACGACATATTCAAGAGCGCGATATCAAAGTTCCGCAATAGCGGAGAG
AAAAAAACCGCTCTTTTCGGGATTGCTTTGAATCAGATGGGACTAGCTTGCGTTCAGCGTTACGCGATCAATGAAGCTGCAGAT
TTGTTTGAAGAAGCGAAAACTATTCTTGAGAAAGAGTGTGGACCGTACCATCCCGATACATTAGCGGTTTACAGTAACCTTGCTG
GAACGTACGACGCAATGGGAAGGTTAGATGATGCTATAGAGATATTGGAGTATGTTGTTGGGACAAGAGAAGAGAAGCTCGGG
ACGGCAAATCCCGAGGTTGAGGACGAGAAGCAGAGGCTTGCTGCGTTGTTGAAAGAAGCTGGAAGAGGAAGGAGTAAAAGAA
ACAGAGCACTTCTTACCCTTTTGGACAACAACCCTGAAATTGCAAATGGACAGAGACCGGTTTATTGATTAACCGGATTATTGTC
CGGTCTAAAATGTATATATATACAAAATACAAGTTCGAATACGGTACTTACACGGTCGAGGGAGAAGGAAAAAAATGAAGAGGC
TTTATGTTTTCTAGTTTTATAAAAAGTGAAGGAAAAAAAAAAAAATCTTGCATTTGTTTTCTTTATAAATAAAATGTAAAGAGTAAAA
CGCAATTGATTTGGTCGTTTTGTAATGTGATTTACATTGAAATTTTGGAGTTTAAAAATCTCCTTGATGGCAGTTTCTCTAACTTTG
AGCACTG
SEQIDNO: 423
MDVGESNERVKDDSALQASPRSPLSSIDLAIDGAMNASIEQLYHNVCEMESSDDQSPSRASFISYGAESRIDLELRHLVGDVGEEGE
SKKEIILEKKEESNGEGSLSQKKPLSNGKKVAKTSPNNPKMPGSRISSRKSPDLGKVSVDEESPELGVVLLKQARELVSSGENLNKAL
DLALRAVKVFEKCGEGEKQLGLNLVMSLHILAAIYAGLGRYNDAVPVLERSIEIPMIEDGEDHALAKFAGCMQLGDMYGLMGQVENSI
MLYTAGLEIQRQVLGESDARVGETCRYLAEAHVQAMQFEEASRLCQMALDIHKENGAAATASIEEAADRKLMGLICDAKGDYEVALE
HYVLASMAMSSQNHREDVAAVDCSIGDAYMSLARFDEAIFAYQKALAVFKQGKGETHSSVALVYVRLADLYNKIGKTRDSKSYCENA
LKIYLKPTPGTPMEEVATGFIEISAIYQSMNELDQALKLLRRALKIYANAPGQQNTIAGIEAQMGVVTYMMGNYSESYDIFKSAISKFRN
SGEKKTALFGIALNQMGLACVQRYAINEAADLFEEAKTILEKECGPYHPDTLAVYSNLAGTYDAMGRLDDAIEILEYVVGTREEKLGTA
NPEVEDEKQRLAALLKEAGRGRSKRNRALLTLLDNNPEIANGQRPVY
SEQIDNO: 424
ATGGCCGCCGCAGTTTCCACCGTCGGTGCCATCAACAGAGCTCCGTTGAGCTTGAACGGGTCAGGATCAGGAGCTGTATCAG
CCCCAGCTTCAACCTTCTTGGGAAAGAAAGTTGTAACTGTGTCGAGATTCGCACAGAGCAACAAGAAGAGCAACGGATCATTCA
AGGTGTTG
SEQIDNO: 425
MAAAVSTVGAINRAPLSLNGSGSGAVSAPASTFLGKKVVTVSRFAQSNKKSNGSFKVLG
SEQIDNO: 426
TTTCATGGTCCGTAGACTTTTATCAGGTTTTTAATTAGGTTTCTGAATTGAAATTATATCTTATTTAGTATATATAAAGAAAATAATT
ATTTTAACCTATTATATCAAAACAGTGAATCCTTTAACTCTAAAACTAATCCTATCTTTATTTTACAAAAAATACTAAACCTATCTAT
TATTTTTTTTAAATGTTAAACCCATCATCTAGGATAGTTTTAAATTCGCATAAAAAAAGATAGTTTTAAATTAGATAGGATTTTTTTT
ATATCAAAACATTGAATCCTTAAACTCTATAACTAATCCTATCTTTATTTTTAAAAAAATACTAAACCTATCTAATATTTTTTTAAAG
GATAAACCTATCTAATCTAAGATAGTTTTAAATTAGATAGGATTTTTTTATATCAAAACAGTGAATCCTTAAACTCTAAAATTAATCC
TATCTTTATTTAAAACTATCTAATCTTTTTTTTAAGGATAAACCTATCTAATCTAAGATAGTTTTAAATTAGATAGGTTTAGTAAACC
TATATGAATTTTATTTTTTTATGATTAAAAAAAAATCTTAGATATGATTTTATTTTAATCCCAGCATTTGCCACGTTCGAACGTGAGC
CAAAACGATGTCGTTACAATATCTTAACCTAGCCGAAACGATGTCGTGGTAACTCATAATATCGCAGCCTTCTGTTTCGTCCTTG
CCCAATGCCAACTGGACTACGCCGAACCCACAAAACCCGACATCCGCGCGAACCAAAGCGCGTGACGCCAAATTGCTCAAACC
ACAAAGGAAACAAAGGCGCGTTAATAACACGCGCTATCCCACGCGTGTTAAGCACAGTAACGTTCAACAAAGAGAAGCAGGGT
ATAATGGGAAACCAAAGAGAAACCTAAGGCCATTATGGGAAACAAAAAGTAGCTCACTCATTATAAAATTCAAGTAACCCTAGTT
TTCATCATCACTCTGCTGCCTCGCTCTGTTTCTGTCTCTGTGTTTGCGGCTGAGGATTCCGAACGAGCGACCTTCTTCGTTTCTC
GCAAAGGTAACAGCCTCTGCTCTTGTCTCTTCCATTCGATCCATGCCTGTCTCTTCTTTACGATGATGTTTCTTCGGTGTATGTTT
ATTTATTTATTTATTTATGCTTTATGTTGTGAATGTTCGGTTGTTTTGTTTCGCTTTGCTTTTGTGGATTCTATTGGTTTTTGAATCA
GTTAATCGGAAGAGATTTTCGAGTTGTTTTGTGTTTTGGAGGTGAATCTTTTTGTTGAGGTCGCAGATCTGTTGATTTTGTGTCAT
AAACGTGCGACTCTGTTTGATTTTTTACGAGGTTATGACGTTTTGGTTGTTTTATTATGGATCTGTTAAGGCAGAACCATGATTTA
TGTTTATGTTCGTTTACACGATTAAATTTTCTTGTAACACGATGAAGTTTTTTTAAACACGTTGAAGGAGTCTTGTTGATATGAATT
TGTCGATTGTTTTTTTGTGGTTTTGTTCTCACGTTATCAAGCGTAATCTTTTACTATGTACGCGAACATATCTAGATCTAGCAGAG
CTTTTTTTTTTTTTAATTCTTTGTGAAGCTTTTGAAATATGAAATTTGTTTTTCAAATTTTTTTTAATTTATTGAAAACACTGTGGATA
CTGAATAAGGTTCTATGTATGATGCGAACCATGTTTGATATGTTTGTTTTTGTTGTTCCATATGGATTTTTCTGTTAGATTTCCATA
TGCTTTTGAGTTTGTTTTTGCTGTTACAGATTGATTTACTTTTTAGAATATTTCTCTTGGCTTTCACTGTTTTAGAAATTTTTTGTTA
TTGGTAACTATAAATGTGTGAATTTGGATTATACCTTTACCTTGTTATTTAGTTGTGTGATAATTTGGTTTATAGTTATTTTGAGTTC
TGACTCGTGTTTCTTTGAATTGATTCCAGTTTAAGTCATCTCGAG
SEQIDNO: 427
AGAATTTTACTTAAATCTCTACTACATAAAATAATAAAAATATAATATATTGCATGATATTTAGTAACTGTAAAAAAAAATATAAATA
TTACATGATATTTAATAACTGTAAACAAATAAAAATATAATATATTGCATGATATTTAGTAATAGTAAACTAAATAATAAAAAATTAT
GACATGGAAACTTTTATAAAAAAAGAAATACTATAATTTTTAAGATAGACAATGATAGGAAAAAAAATTAAAAAGTTTCAACGACTA
CACATTTAAAATTTAAAATTAATAATTGCTTTCTACAAAATGAGAATATATTAGTTTACAAAAGTAAAATAGTTACCAAATTTATTGA
AAAAACACATTTTTTTTATTCAAAATTATATTTTTCTTTTTTTAGTTTTATATTAATAATAACAAATCAAAATTAGTGATTTATCATTAT
TGAGAATAAAAAAGTTGTTTTAATATAATTATATTTATTATGTTATAAATTTAAATTTGTTTAATACTTTTTTTATTATAATTAAATAGA
AAAAATAAAAATTAAATTACATTACTTTTTAAAGTTCTTTTACCAACTCGATGAAATTATTATATTTGACAAAATTATTTTTAATATTT
GATGCAAATTTATTTTTTTGCAAAATTAATTAATTAAAGAAAAATACATTAAAATAAAGATAATACATAAATATAAAAATGATATGAT
GTAAAACTAATCTATTATACCATACTTAAAAGATTTGTTTTGGAAACTGCACTAAACTACGTCGTTTTGGTGGGCGCATAATTAAA
CCCTAACCAGGGCTTCATCACGACACTCTCGGGGCCTCCCGCACAGCAAGCGAAAGCAAAAAGGATCCAAATGGAACTACTTA
AAATAATAAGGGTATTTTCGTCAACAGAGGAAAAAACTTGTAGCCTATAAATAAACCCTCTAACCCTCGTTTCCTCACTTCTCTTC
ACTCTATCATTCTCCTTTCTTCTCTTGCGGCTAGGGTTTTAGCGCAGCTTCTTCTAGGTACGTTTTCTTATGCCGTTTCATTAGTT
TTAATTCTTCTATTCATGCTTATCCTATTGGATTGTGTTGCCTGCTGAATATGGTTTTCTATATGTTGTTTATGTCTTCAATATATCT
CTGTTTTGTTGATGAATTTTAATTGTTTCACATGAATTTCATGTTTTTTTCGAATTTTTGTCTGAGTTATTGGTTATAATCGGTAAGA
TGTCTTCAAAAAATGATTTTTTTTTTCGTTTGGTTTTGTACCTTTGAAATACTCAGATTTGATTTGATTTTTGTGGATTTGTGTGTTT
TTTATATTCAAATCCATGGATCCAGATCTGGTTAAACTTTTGCTTTTTGTTTAAGATTTTTCTCAATTCTGATGGATGGATCTATAA
CCTTTTGGTTTTAATCGATTCAAGTCGCATTTTTTTTTTGAGATGGCATGATAAATGTGTGGTTTAACCCACTGGTTTTAATTGGTT
CAAGTTGCGGATTTTACGGGATGACATGATAATTGTTTGGTTTAACCTTTTATTTTAATCGATTCAAGTCGCTGATTTTACGAGAT
GACATGATAAATGTGTGGTTTAACCTTTTGGTTTTAATCGATTCAAGTTGCTGACTTTACGAGATAGACATATAAATGCGTGGGTG
TCTTGAATACCTTTTTCGGATGTGGTGTAGTAACATATGTGTGGGTGACTTGAATACCTTGTTTGCATGTGGGTGTCTTGAATAC
CTTGTTTTTGTGGTGTAGTAACTTATGTGTGGGTGTCTTGAATACATTGTTTGCATGTGGCGTAGTAACTTAATTTTGACGTGTCA
ATGCGTCAATATTTTTATTTCTGTATGTAATCTGTTTTGTGTTCCCTTTGCTCTAATGAATTATACCTACTAATAGCTTGTTGTCTG
CGTTGCTTATAGTTGTATGCCTGCTTTATATGAAGTTTGTGTGCAAGGAATTTGGAGATTACCCGATATTTTAATGTTTTAATGGT
TATACATGTCTTGTAATATAAAGCTTGTTGTGTGATTTCTTCTTATATATTGCCGTTACTTTTAATTGGTATGCATAATGTAAACTTT
GTTTTTAGATATTACCCAATATATTATTTATGATTATCCATGGTTTGTTGTATATGCGAACCCATCTCCTTTGTGTGATGTGGCTAT
TTTTTGGTTTAAGATGATGCTAATGTATGCATTTAGTTGTTGCTTTTTGCAGATACTCAAACGCAGTT
SEQIDNO: 428
AATCTACTTCAGATTCTTGTTCTTGTGGTCTTTTTCTGTTGTTGTGTTTGATGTTCAGATGTACCAGTACCGTTGTGGGTTTTAATT
TGGATGCATTGTTTTTATGCTTCGCTGCTTCTGTTACAGACCCAAACGGAATGGCAATATATATTTTGACCATTGTCTGAACTACT
ATTTTGTTTTAGCTGTGTTAATTATTGACTTTTTTTCTTTTCGATTAAGTGTGGTACTTTTTCGGAACTTAAGGGCCAAAAATTTGA
TTGTAGAGGAGAGGAGTTTTGAGATCCCCTTCCTTTAGGAAATGAGAAAAAAAAATAGAAAAGAAACGAGATTTTTAAAATTCTTA
CTAGT
SEQIDNO: 429
AACAATGAGCCCAGAAAGAAGACCTGCTGATATTAGACGTGCTACTGAAGCTGACATGCCAGCAGTCTGTACTATTGTTAACCA
TTACATTGAGACTTCTACTGTTAACTTCAGAACTGAACCACAAGAACCTCAAGAGTGGACTGATGATCTTGTTAGACTTAGAGAG
AGATATCCATGGCTTGTTGCTGAAGTTGATGGAGAAGTTGCTGGAATTGCTTATGCTGGACCATGGAAGGCTAGAAACGCTTAT
GATTGGACTGCTGAATCTACTGTTTACGTGTCTCCAAGACATCAAAGAACTGGACTTGGATCTACTCTTTACACTCATCTTCTTAA
GTCTCTTGAAGCTCAAGGATTCAAGTCTGTTGTTGCTGTTATTGGACTTCCAAACGATCCATCTGTTAGAATGCATGAAGCTCTT
GGATATGCTCCAAGAGGAATGCTTAGAGCTGCTGGATTCAAGCATGGAAACTGGCATGATGTTGGATTCTGGCAACTTGATTTC
TCTCTTCCAGTTCCACCAAGACCAGTTCTTCCAGTTACTGAGATTTGATTCGAA
SEQIDNO: 430
MSPERRPADIRRATEADMPAVCTIVNHYIETSTVNFRTEPQEPQEWTDDLVRLRERYPWLVAEVDGEVAGIAYAGPWKARNAYDWT
AESTVYVSPRHQRTGLGSTLYTHLLKSLEAQGFKSVVAVIGLPNDPSVRMHEALGYAPRGMLRAAGFKHGNWHDVGFWQLDFSLPV
PPRPVLPVTEI
SEQIDNO: 431
GGTTTGAGTTTGAGTTCACATATGGGAAAATAGGATTGTCAATTCTAGTTCTTTGTTTCTCTAATGTGTCTCAGTTTATAAGATTTA
GTTTGTTTTCATTTTTCAATTGTATATTTGTGGGGTCAGGAATTTTGATCTCTGTACGAAGTAAATTATGTGAGGAACATCTTTTGC
ATGATTATGCTTTTACAAATTTGGGATGGATGCAATGTCATTCTGAACATGATTTCGTTTTTTTTTAATAATCAACATCATATATATT
GAACAAGGCTTTTAAAACAGAACCCGTGTGAAGGTATATATACAAGATTATATAATAATTAAG
SEQIDNO: 432
CTAGTGGGTGAATAATCATGTATTGTGTATTGTGAGATTGTAGAGTTCAAAATAAAGATTATACATAATTATGAGTGGTTATATAG
GATATTATTTTTTTTTGCTTACTTTTTTTCCCCTTCAATTTGTATCCTTTTATTATAGTTGAAAAAATATAATAAGAAATTTTAAAATA
ATTAAAGGATAAAGAAGTCTATGTAAAAGTTGATATCGAAAATAATTTTCAAATCAGGTATCTCCTTTATCTATTGGTATAAATTAT
GTTGATATTTTTTCATTTTTGTTATCATTGGCCTTTGTTTATGCTAAGTGGGATGCTAAAAGTCATCCAAACGGATAAATTGCTTTT
TATTTAAATTTTAAAAATTAAAACTTCTAAGTTTTTGAATTTTAAAATTAATTAACCAAAGTCTTAATTAAAACTGTCCATTAATTTAA
ATTTTAAGAATTTACCAAAATTGTCAACTAAAACCGTACAATTTTTTAATTTTAAAAAATGTGTGAATTTGTTAACTATTTTTTTAACT
TTTAACAATCTACCAATTTGTTAATTTTTAAAAATATACCAATTTATTAGTGCTTATTTTTTAAATTGTAAAATCCTAGCAATTTGTTA
ATTAAACCAACGTAAACTAAACAATTGTTATTTAAAAAAAAATATTTTTTTTTAATTTTAAAATTCAAACTATTCCAATTTTCTATTGG
CTTTTTCTTATACTGTCCAAATTTTATTTTAATTTTAATAAAATAACAATTAACTACAAACCAAATTTTTAAACAATTATTAAGAGATT
CATATTTGTTAATGATTGTATCGGATAAAATAAATTTTTTAACCTTTTTAAAAATCAACATCGTAAATTAATTATTATTATTTAGAAAT
AAAAATATCTTTTTAAATTTAAGATTTTATTCCATCCCACAATTTTCTTAGTTTTTTCTTAGATAAATCAGTATTACTTAAATATTATC
ATTTTTTTTTTAAAATACCAAACTATCCCACTACTTCCTTTAATTTTATTTTTATCCTAAAAAAACTTAAAATGTGTTTTTTTTAAAGA
AATATAAAAAATATTTTTCCAACAATAAAATAAATATAAGCTAATGCCTTTTTTTTTAATTTATATAAAATATAATACAAATATGGATA
TACGGGCGGGCAGAGCGGCTGTGTTTCCGCTAGTTTTAATAACAGCCTTCCAATTTATTACTTGTATATCATATGGCTATCAAAA
CTTGTGCACCGTGTGTGACTACGCTACTTCTACACCCTATAATCCGTCTCCGTCTCCAACTTAAGAAAAAAAAAAAACTACAACC
TTTATTTTATTTTTCTAATAGTAAAAAATTGTAAATATGGAACAGCAGTGGGCCGCAATAGAAT
SEQIDNO: 433
GGATCCGATTGTTTTCCATTTGTTTCTGAATTTTGGAATTTTATTTTAGTATAATACTGTTTTTTTTTGGGGTCGCATATTTATCATT
ATGACTGCCTAAATGATCTGCCTTTTCATATTATTATGACTGCTTAAATCTTGATGCATTATTTTTTGAATTTGATTTTAATTTTGAA
ATGAAGTGAGTGATTTATGGCTGAATTTAAGAAATTTGATGGAAATTTATAGGTAAAATCAGTTTTACTTTATCGATAACTTAATGT
TAGC
SEQIDNO: 434
MDNNPNINECIPYNCLSNPEVEVLGGERIETGYTPIDISLSLTQFLLSEFVPGAGFVLGLVDIIWGIFGPSQWDAFLVQIEQLINQRIEEFA
RNQAISRLEGLSNLYQIYAESFREWEADPTNPALREEMRIQFNDMNSALTTAIPLFAVQNYQVPLLSVYVQAANLHLSVLRDVSVFGQ
RWGFDAATINSRYNDLTRLIGNYTDYAVRWYNTGLERVWGPDSRDWVRYNQFRRELTLTVLDIVALFPNYDSRRYPIRTVSQLTREIY
TNPVLENFDGSFRGSAQGIERSIRSPHLMDILNSITIYTDAHRGYYYWSGHQIMASPVGFSGPEFTFPLYGTMGNAAPQQRIVAQLGQ
GVYRTLSSTLYRRPFNIGINNQQLSVLDGTEFAYGTSSNLPSAVYRKSGTVDSLDEIPPQNNNVPPRQGFSHRLSHVSMFRSGFSNS
SVSIIRAPMFSWIHRSAEFNNIIASDSITQIPAVKGNFLFNGSVISGPGFTGGDLVRLNSSGNNIQNRGYIEVPIHFPSTSTRYRVRVRYA
SVTPIHLNVNWGNSSIFSNTVPATATSLDNLQSSDFGYFESANAFTSSLGNIVGVRNFSGTAGVIIDRFEFIPVTA
SEQIDNO: 435
MEENNQNQCIPYNCLSNPEEVLLDGERISTGNSSIDISLSLVQFLVSNFVPGGGFLVGLIDFVWGIVGPSQWDAFLVQIEQLINERIAEF
ARNAAIANLEGLGNNFNIYVEAFKEWEEDPNNPETRTRVIDRFRILDGLLERDIPSFRISGFEVPLLSVYAQAANLHLAILRDSVIFGER
WGLTTINVNENYNRLIRHIDEYADHCANTYNRGLNNLPKSTYQDWITYNRLRRDLTLTVLDIAAFFPNYDNRRYPIQPVGQLTREVYTD
PLINFNPQLQSVAQLPTFNVMESSRIRNPHLFDILNNLTIFTDWFSVGRNFYWGGHRVISSLIGGGNITSPIYGREANQEPPRSFTFNG
PVFRTLSNPTLRLLQQPWPAPPFNLRGVEGVEFSTPTNSFTYRGRGTVDSLTELPPEDNSVPPREGYSHRLCHATFVQRSGTPFLTT
GVVFSWTDRSATLTNTIDPERINQIPLVKGFRVWGGTSVITGPGFTGGDILRRNTFGDFVSLQVNINSPITQRYRLRFRYASSRDARVI
VLTGAASTGVGGQVSVNMPLQKTMEIGENLTSRTFRYTDFSNPFSFRANPDIIGISEQPLFGAGSISSGELYIDKIEII
SEQIDNO: 436
MNPNNRSEHDTIKTTENNEVPTNHVQYPLAETPNPTLEDLNYKEFLRMTADNNTEALDSSTTKDVIQKGISVVGDLLGVVGFPFGGAL
VSFYTNFLNTIWPSEDPWKAFMEQVEALMDQKIADYAKNKALAELQGLQNNVEDYVSALSSWQKNPVSSRNPHSQGRIRELFSQAE
SHFRNSMPSFAISGYEVLFLTTYAQAANTHLFLLKDAQIYGEEWGYEKEDIAEFYKRQLKLTQEYTDHCVKWYNVGLDKLRGSSYES
WVNFNRYRREMTLTVLDLIALFPLYDVRLYPKEVKTELTRDVLTDPIVGVNNLRGYGTTFSNIENYIRKPHLFDYLHRIQFHTRFQPGYY
GNDSFNYWSGNYVSTRPSIGSNDIITSPFYGNKSSEPVQNLEFNGEKVYRAVANTNLAVWPSAVYSGVTKVEFSQYNDQTDEASTQ
TYDSKRNVGAVSWDSIDQLPPETTDEPLEKGYSHQLNYVMCFLMQGSRGTIPVLTWTHKSVDFFNMIDSKKITQLPLVKAYKLQSGA
SVVAGPRFTGGDIIQCTENGSAATIYVTPDVSYSQKYRARIHYASTSQITFTLSLDGAPFNQYYFDKTINKGDTLTYNSFNLASFSTPFE
LSGNNLQIGVTGLSAGDKVYIDKIEFIPVN
SEQIDNO: 437
ATGGATAACAACCCAAACATCAACGAGTGCATTCCATACAACTGCCTCTCTAACCCAGAGGTGGAGGTGCTCGGCGGCGAGAG
GATTGAGACCGGCTACACCCCAATTGATATCTCTCTCTCTCTCACCCAGTTCCTCCTCTCTGAGTTCGTGCCAGGCGCTGGCTT
CGTGCTCGGCCTCGTGGATATCATCTGGGGCATCTTCGGCCCATCTCAGTGGGATGCTTTCCTCGTGCAGATTGAGCAGCTCA
TCAACCAGAGGATTGAGGAGTTCGCTAGGAACCAGGCTATCTCTAGGCTTGAGGGCCTCTCTAACCTCTACCAGATTTACGCTG
AGTCTTTCAGGGAGTGGGAGGCTGATCCAACCAACCCAGCTCTCAGGGAGGAGATGAGGATTCAGTTCAACGATATGAACTCT
GCTCTCACCACCGCTATTCCACTCTTCGCTGTGCAGAACTACCAGGTGCCACTCCTCTCTGTGTACGTGCAGGCTGCTAACCTC
CACCTCTCTGTGCTCAGGGATGTGTCTGTGTTCGGCCAGAGGTGGGGCTTCGATGCTGCTACCATCAACTCTAGGTACAACGA
TCTCACCAGGCTCATTGGCAACTACACCGATTACGCTGTGAGGTGGTACAACACCGGCCTTGAGAGGGTGTGGGGCCCAGATT
CTAGGGATTGGGTGAGGTACAACCAGTTCAGGAGGGAACTCACCCTCACCGTGCTCGATATTGTGGCTCTCTTCCCAAACTAC
GATTCTAGGAGATACCCAATCAGGACCGTGTCTCAGCTCACCAGGGAGATTTACACCAACCCAGTGCTTGAGAACTTCGATGG
CTCTTTCAGGGGCTCTGCTCAGGGCATTGAGAGGTCTATCAGGTCTCCACACCTCATGGATATTCTCAACTCTATCACCATCTAC
ACCGATGCTCACAGGGGCTACTACTACTGGTCTGGCCACCAGATCATGGCTTCTCCAGTGGGCTTCTCTGGCCCAGAGTTCAC
CTTCCCACTCTACGGCACTATGGGCAACGCTGCTCCACAGCAGAGGATTGTGGCTCAGCTCGGCCAGGGCGTGTACAGGACC
CTCTCTTCTACCCTCTACAGGAGGCCATTCAACATTGGCATCAACAACCAGCAGCTCTCTGTGCTCGATGGCACCGAGTTCGCT
TACGGCACCTCTTCTAACCTCCCATCTGCTGTGTACAGGAAGTCTGGCACCGTGGATTCTCTCGATGAGATTCCACCACAGAAC
AACAACGTGCCACCAAGGCAGGGCTTCTCTCACAGGCTCTCTCACGTGTCTATGTTCAGGTCTGGCTTCTCTAACTCTTCTGTG
TCTATCATCAGGGCTCCAATGTTCTCTTGGATTCACAGGTCTGCTGAGTTCAACAACATCATTGCTTCTGATTCTATCACCCAGA
TTCCTGCTGTGAAGGGCAACTTCCTCTTCAACGGCTCTGTGATCTCTGGCCCAGGCTTCACCGGCGGCGATCTCGTGAGGCTC
AACTCTTCTGGCAACAACATTCAGAACAGGGGCTACATTGAGGTGCCAATTCACTTCCCATCTACCTCTACCAGGTACAGGGTG
AGGGTGAGGTACGCTTCTGTGACCCCAATTCACCTCAACGTGAACTGGGGCAACTCTTCTATCTTCTCTAACACCGTGCCAGCT
ACCGCTACCTCTCTCGATAACCTCCAGTCTTCTGATTTCGGCTACTTCGAGTCTGCTAACGCTTTCACCTCTTCTCTCGGCAACA
TTGTGGGCGTGAGGAACTTCTCTGGCACCGCTGGCGTGATCATTGATAGGTTCGAGTTCATTCCAGTGACCGCTTGA
SEQIDNO: 438
ATGGAGGAGAACAACCAGAACCAGTGCATTCCATACAACTGCCTCTCTAACCCAGAGGAGGTGCTCCTCGATGGCGAGAGGAT
CTCTACCGGCAACTCTTCTATTGATATCTCTCTCTCTCTCGTGCAGTTCCTCGTGTCTAACTTCGTGCCAGGCGGCGGCTTCCTC
GTGGGCCTCATTGATTTCGTGTGGGGCATTGTGGGCCCATCTCAGTGGGATGCTTTCCTCGTGCAGATTGAGCAGCTCATCAA
CGAGAGGATTGCTGAGTTCGCTAGGAACGCTGCTATTGCTAACCTTGAGGGCCTCGGCAACAACTTCAACATCTACGTGGAGG
CTTTCAAGGAGTGGGAGGAAGATCCAAACAACCCAGAGACCAGGACCAGGGTGATTGATAGGTTCAGGATTCTCGATGGCCTC
CTTGAGAGGGATATTCCATCTTTCAGGATCTCTGGCTTCGAGGTGCCACTCCTCTCTGTGTACGCTCAGGCTGCTAACCTCCAC
CTCGCTATTCTCAGGGATTCTGTGATCTTCGGCGAGAGGTGGGGCCTCACCACCATCAACGTGAACGAGAACTACAACAGGCT
CATCAGGCACATTGATGAGTACGCTGATCACTGCGCTAACACCTACAACAGGGGCCTCAACAACCTCCCAAAGTCTACCTACCA
GGATTGGATCACCTACAACAGGCTCAGGAGGGATCTCACCCTCACCGTGCTCGATATTGCTGCTTTCTTCCCAAACTACGATAA
CAGGAGGTATCCAATTCAGCCAGTGGGCCAGCTCACCAGGGAGGTGTACACCGATCCACTCATCAACTTCAACCCACAGCTCC
AGTCTGTGGCTCAGCTCCCAACCTTCAACGTGATGGAGTCTTCTAGGATCAGGAACCCACACCTCTTCGATATTCTCAACAACC
TCACCATCTTCACCGATTGGTTCTCTGTGGGCAGGAACTTCTACTGGGGCGGCCACAGGGTGATCTCTTCTCTCATTGGCGGC
GGCAACATTACCTCTCCAATTTACGGCAGGGAGGCTAACCAGGAGCCACCAAGGTCTTTCACCTTCAACGGCCCAGTGTTCAG
GACCCTCTCTAACCCAACCCTCAGGCTCCTCCAGCAGCCTTGGCCAGCTCCACCATTCAACCTCAGGGGCGTGGAGGGCGTG
GAGTTCTCTACCCCAACCAACTCTTTCACCTACAGGGGCAGGGGCACCGTGGATTCTCTCACCGAACTCCCACCAGAGGATAA
CTCTGTGCCACCAAGGGAGGGCTACTCTCACAGGCTCTGCCACGCTACCTTCGTGCAGAGGTCTGGCACCCCATTCCTCACCA
CCGGCGTGGTGTTCTCTTGGACCGATAGGTCTGCTACCCTCACCAACACCATTGATCCAGAGAGGATCAACCAGATTCCACTC
GTGAAGGGCTTCAGGGTGTGGGGCGGCACCTCTGTGATTACCGGCCCAGGCTTCACCGGCGGCGATATTCTCAGGAGGAACA
CCTTCGGCGATTTCGTGTCTCTCCAGGTGAACATCAACTCTCCAATTACCCAGAGGTACAGGCTCAGGTTCAGGTACGCTTCTT
CTAGGGATGCTAGGGTGATTGTGCTCACCGGCGCTGCTTCTACCGGCGTGGGCGGCCAGGTGTCTGTGAACATGCCACTCCA
GAAGACTATGGAGATTGGCGAGAACCTCACCTCTAGGACCTTCAGGTACACCGATTTCTCTAACCCATTCTCTTTCAGGGCTAA
CCCAGATATCATTGGCATCTCTGAGCAGCCACTCTTCGGCGCTGGCTCTATTTCTTCTGGCGAACTCTACATTGATAAGATTGAG
ATCATTTGA
SEQIDNO: 439
ATGAACCCAAACAACAGGTCTGAGCACGATACCATCAAGACCACCGAGAACAACGAGGTGCCAACCAACCACGTGCAGTACCC
ACTCGCTGAGACCCCAAACCCAACCCTTGAGGATCTCAACTACAAGGAGTTCCTCAGGATGACCGCTGATAACAACACCGAGG
CTCTCGATTCTTCTACCACCAAGGATGTGATTCAGAAGGGCATTTCTGTGGTGGGCGATCTCCTCGGCGTGGTGGGCTTCCCAT
TCGGCGGCGCTCTCGTGTCTTTCTACACCAACTTCCTCAACACCATTTGGCCATCTGAAGATCCTTGGAAGGCTTTCATGGAGC
AGGTGGAGGCTCTCATGGATCAGAAGATTGCTGATTACGCTAAGAACAAGGCTCTCGCTGAACTCCAGGGCCTCCAGAACAAC
GTGGAGGATTACGTGTCTGCTCTCTCTTCTTGGCAGAAGAACCCAGTGTCTTCTAGGAACCCACACTCTCAGGGCAGGATTAGG
GAACTCTTCTCTCAGGCTGAGTCTCACTTCAGGAACTCTATGCCATCTTTCGCTATCTCTGGCTACGAGGTGCTCTTCCTCACCA
CCTACGCTCAGGCTGCTAACACCCACCTCTTCCTCCTCAAGGATGCTCAGATTTACGGCGAGGAGTGGGGCTACGAGAAGGAG
GATATTGCTGAGTTCTACAAGAGGCAGCTCAAGCTCACCCAGGAGTACACCGATCACTGCGTGAAGTGGTACAACGTGGGCCT
CGATAAGCTCAGGGGCTCTTCTTACGAGTCTTGGGTGAACTTCAACAGGTACAGGAGGGAGATGACCCTCACCGTGCTCGATC
TCATTGCTCTCTTCCCACTCTACGATGTGAGGCTCTACCCAAAGGAGGTGAAGACCGAACTCACCAGGGATGTGCTCACCGAT
CCAATTGTGGGCGTGAACAACCTCAGGGGCTACGGCACCACCTTCTCTAACATTGAGAACTACATCAGGAAGCCACACCTCTTC
GATTACCTCCACAGGATTCAGTTCCACACCAGGTTCCAGCCAGGCTACTACGGCAACGATTCTTTCAACTACTGGTCTGGCAAC
TACGTGTCTACCAGGCCATCTATTGGCTCTAACGATATCATTACCTCTCCATTCTACGGCAACAAGTCTTCTGAGCCAGTGCAGA
ACCTTGAGTTCAACGGCGAGAAGGTGTACAGGGCTGTGGCTAACACCAACCTCGCTGTGTGGCCATCTGCTGTGTACTCTGGC
GTGACCAAGGTGGAGTTCTCTCAGTACAACGATCAGACCGATGAGGCTTCTACCCAGACCTACGATTCTAAGAGGAACGTGGG
CGCTGTGTCTTGGGATTCTATTGATCAGCTCCCACCAGAGACCACCGATGAGCCACTTGAGAAGGGCTACTCTCACCAGCTCA
ACTACGTGATGTGCTTCCTCATGCAGGGCTCTAGGGGCACCATTCCAGTGCTCACCTGGACCCACAAGTCTGTGGATTTCTTCA
ACATGATTGATTCTAAGAAGATCACCCAGCTCCCACTCGTGAAGGCTTACAAGCTCCAGTCTGGCGCTTCTGTGGTGGCTGGCC
CAAGGTTCACCGGCGGCGATATCATTCAATGCACCGAGAACGGCTCTGCTGCTACCATTTACGTGACCCCAGATGTGTCTTACT
CTCAGAAGTACAGGGCTAGGATTCACTACGCTTCTACCTCTCAGATCACCTTCACCCTCTCTCTCGATGGCGCTCCATTCAACC
AGTACTACTTCGATAAGACCATCAACAAGGGCGATACCCTCACCTACAACTCTTTCAACCTCGCTTCTTTCTCTACCCCATTCGA
ACTCTCTGGCAACAACCTCCAGATTGGCGTGACCGGCCTCTCTGCTGGCGATAAGGTGTACATTGATAAGATTGAGTTCATTCC
AGTGAACTGA
SEQIDNO: 440
TGAGCAGAAACTTGGATATCTGGCAGCAGAAAAACAAGTAGTTGAGAACTAAGAAGAAGGAA
SEQIDNO: 441
GTCATTGAAAAATTTGCAAAGCATCTGTAGCCACCCCACTTTGTTTGTTG
SEQIDNO: 442
MDNNPNINECIPYNCLSNPEVEVLGGERIETGYTPIDISLSLTQFLLSEFVPGAGFVLGLVDIIWGIFGPSQWDAFLVQIEQLINQRIEEFA
RNQAISRLEGLSNLYQIYAESFREWEADPTNPALREEMRIQFNDMNSALTTAIPLFAVQNYQVPLLSVYVQAANLHLSVLRDVSVFGQ
RWGFDAATINSRYNDLTRLIGNYTDYAVRWYNTGLERVWGPDSRDWVRYNQFRRELTLTVLDIVALFPNYDSRRYPIRTVSQLTREIY
TNPVLENFDGSFRGSAQGIERSIRSPHLMDILNSITIYTDAHRGYYYWSGHQIMASPVGFSGPEFTFPLYGTMGNAAPQQRIVAQLGQ
GVYRTLSSTLYRRPFNIGINNQQLSVLDGTEFAYGTSSNLPSAVYRKSGTVDSLDEIPPQNNNVPPRQGFSHRLSHVSMFRSGFSNS
SVSIIRAPMFSWIHRSAEFNNIIASDSITQIPAVKGNFLFNGSVISGPGFTGGDLVRLNSSGNNIQNRGYIEVPIHFPSTSTRYRVRVRYA
SVTPIHLNVNWGNSSIFSNTVPATATSLDNLQSSDFGYFESANAFTSSLGNIVGVRNFSGTAGVIIDRFEFIPVTAGSGAKQLLNFDLLK
LAGDVESNPGPMEENNQNQCIPYNCLSNPEEVLLDGERISTGNSSIDISLSLVQFLVSNFVPGGGFLVGLIDFVWGIVGPSQWDAFLV
QIEQLINERIAEFARNAAIANLEGLGNNFNIYVEAFKEWEEDPNNPETRTRVIDRFRILDGLLERDIPSFRISGFEVPLLSVYAQAANLHL
AILRDSVIFGERWGLTTINVNENYNRLIRHIDEYADHCANTYNRGLNNLPKSTYQDWITYNRLRRDLTLTVLDIAAFFPNYDNRRYPIQP
VGQLTREVYTDPLINFNPQLQSVAQLPTFNVMESSRIRNPHLFDILNNLTIFTDWFSVGRNFYWGGHRVISSLIGGGNITSPIYGREAN
QEPPRSFTFNGPVFRTLSNPTLRLLQQPWPAPPFNLRGVEGVEFSTPTNSFTYRGRGTVDSLTELPPEDNSVPPREGYSHRLCHAT
FVQRSGTPFLTTGVVFSWTDRSATLTNTIDPERINQIPLVKGFRVWGGTSVITGPGFTGGDILRRNTFGDFVSLQVNINSPITQRYRLR
FRYASSRDARVIVLTGAASTGVGGQVSVNMPLQKTMEIGENLTSRTFRYTDFSNPFSFRANPDIIGISEQPLFGAGSISSGELYIDKIEII
GSGVKQTLNFDLLKLAGDVESNPGPMNPNNRSEHDTIKTTENNEVPTNHVQYPLAETPNPTLEDLNYKEFLRMTADNNTEALDSSTT
KDVIQKGISVVGDLLGVVGFPFGGALVSFYTNFLNTIWPSEDPWKAFMEQVEALMDQKIADYAKNKALAELQGLQNNVEDYVSALSS
WQKNPVSSRNPHSQGRIRELFSQAESHFRNSMPSFAISGYEVLFLTTYAQAANTHLFLLKDAQIYGEEWGYEKEDIAEFYKRQLKLTQ
EYTDHCVKWYNVGLDKLRGSSYESWVNFNRYRREMTLTVLDLIALFPLYDVRLYPKEVKTELTRDVLTDPIVGVNNLRGYGTTFSNIE
NYIRKPHLFDYLHRIQFHTRFQPGYYGNDSFNYWSGNYVSTRPSIGSNDIITSPFYGNKSSEPVQNLEFNGEKVYRAVANTNLAVWPS
AVYSGVTKVEFSQYNDQTDEASTQTYDSKRNVGAVSWDSIDQLPPETTDEPLEKGYSHQLNYVMCFLMQGSRGTIPVLTWTHKSVD
FFNMIDSKKITQLPLVKAYKLQSGASVVAGPRFTGGDIIQCTENGSAATIYVTPDVSYSQKYRARIHYASTSQITFTLSLDGAPFNQYYF
DKTINKGDTLTYNSFNLASFSTPFELSGNNLQIGVTGLSAGDKVYIDKIEFIPVN
SEQIDNO: 443
ACTCGAGTGAGCAGAAACTTGGATATCTGGCAGCAGAAAAACAAGTAGTTGAGAACTAAGAAGAAGGAAATGGATAACAACCCA
AACATCAACGAGTGCATTCCATACAACTGCCTCTCTAACCCAGAGGTGGAGGTGCTCGGCGGCGAGAGGATTGAGACCGGCTA
CACCCCAATTGATATCTCTCTCTCTCTCACCCAGTTCCTCCTCTCTGAGTTCGTGCCAGGCGCTGGCTTCGTGCTCGGCCTCGT
GGATATCATCTGGGGCATCTTCGGCCCATCTCAGTGGGATGCTTTCCTCGTGCAGATTGAGCAGCTCATCAACCAGAGGATTGA
GGAGTTCGCTAGGAACCAGGCTATCTCTAGGCTTGAGGGCCTCTCTAACCTCTACCAGATTTACGCTGAGTCTTTCAGGGAGTG
GGAGGCTGATCCAACCAACCCAGCTCTCAGGGAGGAGATGAGGATTCAGTTCAACGATATGAACTCTGCTCTCACCACCGCTA
TTCCACTCTTCGCTGTGCAGAACTACCAGGTGCCACTCCTCTCTGTGTACGTGCAGGCTGCTAACCTCCACCTCTCTGTGCTCA
GGGATGTGTCTGTGTTCGGCCAGAGGTGGGGCTTCGATGCTGCTACCATCAACTCTAGGTACAACGATCTCACCAGGCTCATT
GGCAACTACACCGATTACGCTGTGAGGTGGTACAACACCGGCCTTGAGAGGGTGTGGGGCCCAGATTCTAGGGATTGGGTGA
GGTACAACCAGTTCAGGAGGGAACTCACCCTCACCGTGCTCGATATTGTGGCTCTCTTCCCAAACTACGATTCTAGGAGATACC
CAATCAGGACCGTGTCTCAGCTCACCAGGGAGATTTACACCAACCCAGTGCTTGAGAACTTCGATGGCTCTTTCAGGGGCTCT
GCTCAGGGCATTGAGAGGTCTATCAGGTCTCCACACCTCATGGATATTCTCAACTCTATCACCATCTACACCGATGCTCACAGG
GGCTACTACTACTGGTCTGGCCACCAGATCATGGCTTCTCCAGTGGGCTTCTCTGGCCCAGAGTTCACCTTCCCACTCTACGG
CACTATGGGCAACGCTGCTCCACAGCAGAGGATTGTGGCTCAGCTCGGCCAGGGCGTGTACAGGACCCTCTCTTCTACCCTCT
ACAGGAGGCCATTCAACATTGGCATCAACAACCAGCAGCTCTCTGTGCTCGATGGCACCGAGTTCGCTTACGGCACCTCTTCTA
ACCTCCCATCTGCTGTGTACAGGAAGTCTGGCACCGTGGATTCTCTCGATGAGATTCCACCACAGAACAACAACGTGCCACCAA
GGCAGGGCTTCTCTCACAGGCTCTCTCACGTGTCTATGTTCAGGTCTGGCTTCTCTAACTCTTCTGTGTCTATCATCAGGGCTC
CAATGTTCTCTTGGATTCACAGGTCTGCTGAGTTCAACAACATCATTGCTTCTGATTCTATCACCCAGATTCCTGCTGTGAAGGG
CAACTTCCTCTTCAACGGCTCTGTGATCTCTGGCCCAGGCTTCACCGGCGGCGATCTCGTGAGGCTCAACTCTTCTGGCAACA
ACATTCAGAACAGGGGCTACATTGAGGTGCCAATTCACTTCCCATCTACCTCTACCAGGTACAGGGTGAGGGTGAGGTACGCT
TCTGTGACCCCAATTCACCTCAACGTGAACTGGGGCAACTCTTCTATCTTCTCTAACACCGTGCCAGCTACCGCTACCTCTCTC
GATAACCTCCAGTCTTCTGATTTCGGCTACTTCGAGTCTGCTAACGCTTTCACCTCTTCTCTCGGCAACATTGTGGGCGTGAGG
AACTTCTCTGGCACCGCTGGCGTGATCATTGATAGGTTCGAGTTCATTCCAGTGACCGCTGGCTCTGGCGCTAAGCAGCTCCT
CAACTTCGATCTCCTCAAGCTCGCTGGCGATGTGGAGTCTAACCCAGGCCCAATGGAGGAGAACAACCAGAACCAGTGCATTC
CATACAACTGCCTCTCTAACCCAGAGGAGGTGCTCCTCGATGGCGAGAGGATCTCTACCGGCAACTCTTCTATTGATATCTCTC
TCTCTCTCGTGCAGTTCCTCGTGTCTAACTTCGTGCCAGGCGGCGGCTTCCTCGTGGGCCTCATTGATTTCGTGTGGGGCATT
GTGGGCCCATCTCAGTGGGATGCTTTCCTCGTGCAGATTGAGCAGCTCATCAACGAGAGGATTGCTGAGTTCGCTAGGAACGC
TGCTATTGCTAACCTTGAGGGCCTCGGCAACAACTTCAACATCTACGTGGAGGCTTTCAAGGAGTGGGAGGAAGATCCAAACA
ACCCAGAGACCAGGACCAGGGTGATTGATAGGTTCAGGATTCTCGATGGCCTCCTTGAGAGGGATATTCCATCTTTCAGGATCT
CTGGCTTCGAGGTGCCACTCCTCTCTGTGTACGCTCAGGCTGCTAACCTCCACCTCGCTATTCTCAGGGATTCTGTGATCTTCG
GCGAGAGGTGGGGCCTCACCACCATCAACGTGAACGAGAACTACAACAGGCTCATCAGGCACATTGATGAGTACGCTGATCAC
TGCGCTAACACCTACAACAGGGGCCTCAACAACCTCCCAAAGTCTACCTACCAGGATTGGATCACCTACAACAGGCTCAGGAG
GGATCTCACCCTCACCGTGCTCGATATTGCTGCTTTCTTCCCAAACTACGATAACAGGAGGTATCCAATTCAGCCAGTGGGCCA
GCTCACCAGGGAGGTGTACACCGATCCACTCATCAACTTCAACCCACAGCTCCAGTCTGTGGCTCAGCTCCCAACCTTCAACG
TGATGGAGTCTTCTAGGATCAGGAACCCACACCTCTTCGATATTCTCAACAACCTCACCATCTTCACCGATTGGTTCTCTGTGGG
CAGGAACTTCTACTGGGGCGGCCACAGGGTGATCTCTTCTCTCATTGGCGGCGGCAACATTACCTCTCCAATTTACGGCAGGG
AGGCTAACCAGGAGCCACCAAGGTCTTTCACCTTCAACGGCCCAGTGTTCAGGACCCTCTCTAACCCAACCCTCAGGCTCCTC
CAGCAGCCTTGGCCAGCTCCACCATTCAACCTCAGGGGCGTGGAGGGCGTGGAGTTCTCTACCCCAACCAACTCTTTCACCTA
CAGGGGCAGGGGCACCGTGGATTCTCTCACCGAACTCCCACCAGAGGATAACTCTGTGCCACCAAGGGAGGGCTACTCTCAC
AGGCTCTGCCACGCTACCTTCGTGCAGAGGTCTGGCACCCCATTCCTCACCACCGGCGTGGTGTTCTCTTGGACCGATAGGTC
TGCTACCCTCACCAACACCATTGATCCAGAGAGGATCAACCAGATTCCACTCGTGAAGGGCTTCAGGGTGTGGGGCGGCACCT
CTGTGATTACCGGCCCAGGCTTCACCGGCGGCGATATTCTCAGGAGGAACACCTTCGGCGATTTCGTGTCTCTCCAGGTGAAC
ATCAACTCTCCAATTACCCAGAGGTACAGGCTCAGGTTCAGGTACGCTTCTTCTAGGGATGCTAGGGTGATTGTGCTCACCGGC
GCTGCTTCTACCGGCGTGGGCGGCCAGGTGTCTGTGAACATGCCACTCCAGAAGACTATGGAGATTGGCGAGAACCTCACCT
CTAGGACCTTCAGGTACACCGATTTCTCTAACCCATTCTCTTTCAGGGCTAACCCAGATATCATTGGCATCTCTGAGCAGCCACT
CTTCGGCGCTGGCTCTATTTCTTCTGGCGAACTCTACATTGATAAGATTGAGATCATTGGCTCTGGCGTGAAGCAGACCCTCAA
CTTCGATCTCCTCAAGCTCGCTGGCGATGTGGAGTCTAACCCAGGCCCAATGAACCCAAACAACAGGTCTGAGCACGATACCA
TCAAGACCACCGAGAACAACGAGGTGCCAACCAACCACGTGCAGTACCCACTCGCTGAGACCCCAAACCCAACCCTTGAGGAT
CTCAACTACAAGGAGTTCCTCAGGATGACCGCTGATAACAACACCGAGGCTCTCGATTCTTCTACCACCAAGGATGTGATTCAG
AAGGGCATTTCTGTGGTGGGCGATCTCCTCGGCGTGGTGGGCTTCCCATTCGGCGGCGCTCTCGTGTCTTTCTACACCAACTT
CCTCAACACCATTTGGCCATCTGAAGATCCTTGGAAGGCTTTCATGGAGCAGGTGGAGGCTCTCATGGATCAGAAGATTGCTGA
TTACGCTAAGAACAAGGCTCTCGCTGAACTCCAGGGCCTCCAGAACAACGTGGAGGATTACGTGTCTGCTCTCTCTTCTTGGCA
GAAGAACCCAGTGTCTTCTAGGAACCCACACTCTCAGGGCAGGATTAGGGAACTCTTCTCTCAGGCTGAGTCTCACTTCAGGAA
CTCTATGCCATCTTTCGCTATCTCTGGCTACGAGGTGCTCTTCCTCACCACCTACGCTCAGGCTGCTAACACCCACCTCTTCCT
CCTCAAGGATGCTCAGATTTACGGCGAGGAGTGGGGCTACGAGAAGGAGGATATTGCTGAGTTCTACAAGAGGCAGCTCAAGC
TCACCCAGGAGTACACCGATCACTGCGTGAAGTGGTACAACGTGGGCCTCGATAAGCTCAGGGGCTCTTCTTACGAGTCTTGG
GTGAACTTCAACAGGTACAGGAGGGAGATGACCCTCACCGTGCTCGATCTCATTGCTCTCTTCCCACTCTACGATGTGAGGCTC
TACCCAAAGGAGGTGAAGACCGAACTCACCAGGGATGTGCTCACCGATCCAATTGTGGGCGTGAACAACCTCAGGGGCTACG
GCACCACCTTCTCTAACATTGAGAACTACATCAGGAAGCCACACCTCTTCGATTACCTCCACAGGATTCAGTTCCACACCAGGT
TCCAGCCAGGCTACTACGGCAACGATTCTTTCAACTACTGGTCTGGCAACTACGTGTCTACCAGGCCATCTATTGGCTCTAACG
ATATCATTACCTCTCCATTCTACGGCAACAAGTCTTCTGAGCCAGTGCAGAACCTTGAGTTCAACGGCGAGAAGGTGTACAGGG
CTGTGGCTAACACCAACCTCGCTGTGTGGCCATCTGCTGTGTACTCTGGCGTGACCAAGGTGGAGTTCTCTCAGTACAACGAT
CAGACCGATGAGGCTTCTACCCAGACCTACGATTCTAAGAGGAACGTGGGCGCTGTGTCTTGGGATTCTATTGATCAGCTCCC
ACCAGAGACCACCGATGAGCCACTTGAGAAGGGCTACTCTCACCAGCTCAACTACGTGATGTGCTTCCTCATGCAGGGCTCTA
GGGGCACCATTCCAGTGCTCACCTGGACCCACAAGTCTGTGGATTTCTTCAACATGATTGATTCTAAGAAGATCACCCAGCTCC
CACTCGTGAAGGCTTACAAGCTCCAGTCTGGCGCTTCTGTGGTGGCTGGCCCAAGGTTCACCGGCGGCGATATCATTCAATGC
ACCGAGAACGGCTCTGCTGCTACCATTTACGTGACCCCAGATGTGTCTTACTCTCAGAAGTACAGGGCTAGGATTCACTACGCT
TCTACCTCTCAGATCACCTTCACCCTCTCTCTCGATGGCGCTCCATTCAACCAGTACTACTTCGATAAGACCATCAACAAGGGC
GATACCCTCACCTACAACTCTTTCAACCTCGCTTCTTTCTCTACCCCATTCGAACTCTCTGGCAACAACCTCCAGATTGGCGTGA
CCGGCCTCTCTGCTGGCGATAAGGTGTACATTGATAAGATTGAGTTCATTCCAGTGAACTGAGTCATTGAAAAATTTGCAAAGCA
TCTGTAGCCACCCCACTTTGTTTGTTGTCTAGAA
SEQIDNO: 444
TACAAGCCGCACAATACAAGTCGCCTTCTCAAACCCTTCCTCACGACATTCTCGGACCTTATGACACCGTCACCAAAACAATGAT
CCACGCGATATTAGGCGCGTGCAAATCACTCTAATCCGAAACTAGTAGACATGGGAAGCACGAGCTATACGCGAGCGTTTCAAT
TGCCGCCACGAAAGCAGAGAAGGCCAGAAACGGAACCACGGTAAAATGGTAAGGGTATTTTCGTAAACAGAAGAAAAGAGTTG
TAGCTATAAATAAACCCTCTAACCCACGGCGCACTATTTCTCTTCACTCCTTCGTTCACTCTTCTTCTCTTGCGGCTAGGGTTTTA
GCGCAGCTTCTTCTAGGTTCGTTCTCTTCCGCCGCTCTATGGATTTTAAACCTTCGAATCATGTTTATTCCATTGAATTATGTTGC
TTGCAGTTTATATTTTCTGAATCTGTAGTTGTTGTCTTCAATTTATCCTATGCTTTATAGATCAATCTTTTGTGTGTGTAGTACGTA
ATTTTTGTTCTTTTTGCTTTTCGTTCAAGTTGTTGGGAATAATCGGGGTATCATGTTTTGATATTGTTTGTTTTCTTTTTTGACTGCT
TAATAATTTTTAAGTTGGTTTTGGTTTTGGGGTTTTATGTGCTTGTTATATTCAAATCTTTGGATCCAGATCTTACAAAAGTTTTGG
GTTTAAGGATGTTTTTGGCTGATGATGAATAGATCTATAAACTGTTCCTTTTAATCGATTCAAGCTTAGGATTTTACTAGGCTTTTG
CGAATAAATACGTGACAGTAAGCTAATTATGTCCTTTTTTTGTCTCAATCATATCTGTCTGGGTGTGCCATAATTTGTGATATGTC
TATCTGGTAGAATCTTGTGTTTTATGCTTTACGATTTGGTATACCTGTTTTTGAACTTGTTGTATGATGGGTATTTAGATCACCCTA
TCTTTTTTATGCTTCTGGAAGTTTTATGTAAATGTCGAATATCTTAATGTTGTTGAACTTATAATGTTGTGTTGATGTATGTATGAT
GGTTTTGACAACTTTTTTCACTGGTTCTGAAAGTTTTATGTAAATTGCAAATATGTTAATGTTGTTGAACTTATTTTTTTTCCTTCGA
TGTTGTTTTGATGTATGTATGATGGTTTTCACCGTAGTTTCTATGGCTAATATCTTAATGTTGTTGAGCTTATTTTTTTCCTTATATG
TTGTGTTGATGTATGTATGATGGTTTTGACAACTTTTTTAGTTTCTTTCAGATTTAAGGCTCTAGA
SEQIDNO: 445
TGAGTCATCAAATGCTTGGGCTATCAGGGGGTTGAGCTCCACAGTGCTTTGAGCTCTTAGGAATGTCATTACTATTCCACTTACC
TACCTTTGGTGGAGTTTCATTAGGGATGATGCTGCATTTCCAACATCTAATCGTTAAAGACTTCCAAGAAATCTAAGTAGCTTTTC
TTTATTTAGAAGTCCTTATTTCTTTTTATTCTTATAACAATTTAGATGCCTATCTAGTTTTGTATTCATAGATGGGAAAATGATAAAG
TTTACCTTATGTAATATCTTCTTTAATAATGTATCAACATCATTTTTCCTAAGTCTTTGACTAAGTGATTGACAATAATTATAAAAGA
TAATTAAATTTATTTTTATAAAAAATTTAATTAATAAATATATGTGAATTTTTTGTTTAAATTTCAATAGACAATTATGTTGAAAATGA
GATTTCGTTACACACTTTGACAATTATGTTAAATTTCTATTTTCTTTCTGGTTGGCTTTGTTGGGCTTCACACTCCAGTTTGGCAGT
TTAGGAAGAGAGCAAGAAGACCTGACTCAGCCCAAAAGTGCACACCATTGAAAAAAGATCATGTCAATTATATTTTTTCAAAGTT
TAAAATTATGATAAAAAGAAAGAAAAATATTTTCGATTCTTATCAATTATATTTTTTTTTATAAGGATTCATGTTATTTATATTAATAT
ATATCATTTATGTAATTAAAAAATCATATATTTTGTGTAAAATAAATCGTATTGATTTACTGCCTCAATTTAACATTTAATTTAAAGA
GACTTTCTATCATATTTTTTTGAAAAATCTTTCTATCTTATCCTAATAACTCCAAATAAATAATAAATCATTATCATCATGATAATAT
GAAAGAAAGAAAAACATCGGGCCAAGAAGTCAATCAGGCGTGAGAGATCTAGGCCCAAGGCCCATATACTTTAGAATTTCGTTT
GCATTGCGTGGTGGATACAACCCTAAAAAAAACACTACACTTCTCTCTTCGTGTCTCTCACACACACCACTTTATATACCCACGC
AATAGAAGGGAGTGCTACTCTCTTCGCCGCTCTCTCTCTCCTTCTCGCTCTTTCAGGTTCGGTTCCTCTCTGCCTCTAATTTTTC
ACTCGCTTTTCCTTTGCTTCTTTGTTTCCGAAACGATCGGTACCTTTGGTTTTTCTCTCTTCCGTTTATTATCTTCAGATCTGTGCT
TTACTCAAATGTTCAGATTCCGTTTTGTTGTTTTCCTGCGTGCTTTTTAATAAGCTTCTTTCTTGTTTAATACTTTTCGGTGAATCG
GTGTAGTTTTGTTGATTTGCTTGTTGTCTATGTATGGGGTTTTTGCTTTCGCTTACTTTTATACGGAATAAGAATAATCGATTGTTC
TGCTTTTCTTTTTTGTTGTTGTTTAGTAAGCTTTGATATGAATTGATTGAACATGATATTAGGTGATCCAAATCTAAACAGACTTTT
TTTAAATTTTTTTATTTCGTCTTTGTTCGGTTGTTTTACTTTCTGTTTGTGAGTGATGGATCTTGGTTCAACACACACCGACGCACT
TGACTGTTGAGATGTTTTAGCTCTAGACGTGCGCTATTGTTTTTTGATAATTTGTTGAATATTATTTGCGTTCCCTAAAATGATAAT
TTAGGGTTTTAAGCAAATCGCATTATGTGATGAGCCCGTTTGCTGCTTTTGTTTGAAATTTAAAGTTTGTTTTTTTTAAACAATCCA
AACTTATTTCCTGAGGGAGAATAAGGAATTATAACTGTTCCAAGAGAGAAAATTTTAGGTGTATATTAAGATGAGATTTTTTATCT
GTTATGGTCATATTTGTGGTTTTTTTTTACTTATTTGTTTTTTTCAATTTGTTTATGACCGAGTTATGACAACAAATCTTTTGCATCC
TTTTTGCTCTCTTTAAATATCTCTTTTTTCTTTTTCTAGTTTTTGTTGCCTGCATTAAGTATCTTGCTATTTAGCTAACGTTGGTGTT
TTAATTTTTCAGCTTTGACTTTTGTTGGACTAGA
SEQIDNO: 446
CTAGTTAATTACACAAATTTTAATTCATCTAGTAAATTTATGTGTTTGTGTGTAAGTTATTTCAATTAGCTTAAGCTATTTTTTTCATT
TTTATCTTACTAATTTACTTGAAATCTATTTTTATCTTTTTTATTTAGAAACTCTTTTCGTCTACCATGCCACTCTCAATGATATCAC
GTCTTTCACTTCTTCCACTTTCACATTCACACAACGTCAGCATGGTTTAATACAATTGATAAATAGTTAGATATCCTAAACATGTGT
TCTATGAATTTGATTCTTGACTATATGCATGAAAAAGATTATTAAAATAAATAAATAACCAAAGTCACTCTAATTATAAATTTTCAGC
TATCTTTTAAGAAAAAAAAATCTCAAGCACATTCTAAATAAATTTTTAACTAATTTACAGCTATCTATACACATTCACAATGAAGGA
ATGTGAGAATTGTTAGAATATTTAAGAATATGAAAATATTAAAAAAAAAAAACTAAGAAGCCAGAGTTTCCACTTTCCAATATGCA
CTTAAATAAATAGTTCAATTAAGGGTATGTTTGATATAAATTAAATTTTATTTGTAACTTTAGCAATAAAATAAAACTGATTAAAACA
TGTTAAAAAAATTAATAAGTGTTATAAAATATTTTTTTTAAATGAATATTTCCATAAATTTAAATAATAGTATCTTTCAAATATTGACC
CAATAGAAACTAGCCAGCCTATAAATAAATAAATAAATAAATATGAATTAATGTTGATTTAATAAGGGAAGAAAAAAAGGTAGTAG
AAGGGTGTGAAATGAAAAAGAAAAGGCTGTCATCCAGGTCACCCTAACCCTCTTTTCTCGTGGTCGAAATGATTCCTTCTATTTC
AATTTTTGGTCCCAACCCCAATTTTAATTTCAAATGCATTACATTACACTCTCTCACTCTCACACCAACCACACACTCTCTCTCTCT
CTCCGCATATATATACCCCTCTTCTTCATTCTCCTCTTTCTCTGTTCTCATTTCTCTTTCTGTAGCCCTCAATCACCGGAGAGAGA
GTGAGTGCAAAGCCATCGTCTTCTTCTCAGACAAGGTATTCATCTTAATCGCTTGCATCATAGCTTTGATGCAAAGTACGTTTCC
TTTTGCTCTTTGATTCAGCACTTTTTTTTTTTTTTTTTGCAATCTCGCATGTTTATTCTTAGATTTGTTCAACAGTACTACTCTTTATT
TTTTAATCTGTGTGACATTGCTACCTACCTCATCAAAATCATATCTGGATGTTTTTGTATCTGATTATTTATATTCGTACTGCCTGA
TCTATACTGAATGAGATGTAGTGGATTGTGGCGATTTGTAGTTTTAGTGATGCGGATGGCATATCATAGTTCCGATCTTCTAGAC
CTGAGATCTTCGATCTTTTTAAACTGTACTTTTACTTATTTATTTTAAAATGGGGATAGACATCGAATCTATAATCTTGTGTTGGAT
GGCTTTATGGTCTGATCTGTTTTTTATGTGGGAATCTCTCACTTTTTCTTTTTTATTTATCATTGATCTTTCTTTGTTGAAGATCATC
TAGTGTTTGGGAACTTAAGATATCCTGATGAATGTTGAGATTTTAGTAGATATCCTAGTAAGTTTGAGATTACTAGCTGCACATAC
TCCCTTCCTATGTTTATTTTATTCGCCATTTTCTGGACGTTTTCCATTCATTTATAAATTTTGGCAGTTTTACTTTAAAAAAATGATC
AGGATCGGCTCCTTTGTTTGTCAATTTATGTACCTTTTCTTTCTAAGCAATCATAAAGTAGATTATATAATACTGAATTATTTCATTT
GCTTGCTTTCTTCCCATTGATTTTTGTGTGTTATATACAATGTACTGTTGCTGTCTCATATAGAAAATAAACGTAATCTTCAAAGTC
TGTAAGTGGCTGGGTTCTGCAGATTGTCTATTCAAACTTGTTAATACTGGCAATTTGTTCTATGCATACAGTAGTTTGTTAAAAGA
CTAGA
SEQIDNO: 447
ATCTTTAATTGGTTGTTGCTGTCTCTCATTCCAAACAAGTGTGTTCTGTTCTGTCTTTACTGTATGTTGTTCCATGTATGTGTTTAT
GCTGTGTGTTGTGCTTTATGTCATTTGTGATGGTTTAATACTGGGGAAGTTGAAAGTTTTCCGTTAAATGTATCAATAAACTTTTA
TTGCTTTATCTCGATATGATTTTCTAAATCTCTCAGTCGAC
SEQIDNO: 448
ACAATTTAACCCTTCTTTTCTGGGTTGCAGGATAAGACATTGGTTCTTTTGAATTTGCGTGGTGTTTTAGTTTAGGTTTGTTATGT
ATCATACGAATCTCTGGTTTGCATAGAAAATATTTCATTTGAAATTTAAATGGAGTATCGTTTCTGTTAGGCATATTATTTCGGCTA
AATTAGTTTTTTTTTCTTCTATTCTATTTTATTATTTAGGTGTAATTTGTTTTTTTTTTATGTTTTGAGATTCAAATGATGATTTAAAAT
TATTTAAAGATAAATTTGAATTGTCACAATAGTCGAG
SEQIDNO: 449
ACTTGTTGTCGCTGAAAATCCTGAGCTTTAAAATTTGCTTTGTTGTAGTGTATTAATTCTCTCGGTCTTGTGTTCCAATGATGATTT
TGAGAAAGATCATGGAATTGCGAATTGTACCTGCTTAAGTAAGTGGTAACTGTGTGGTTGTGTAATTCGTGTGAATAAACACATG
CTTTCAGAAAATTTGCTGCATGAGTCAGGTGTCTGATACATATGTGAATGTGATGTAGCCAAGAAATAGACCGTGTAATTATTGG
CTAATTGCTTTTGTTATAGCTGAGACACACTATGTGAATTAACTGCAGCTGGCCAGTAATTGAATTTGATTATATTGTTTGTCGAG
SEQIDNO: 450
ACCGTGCAGGGTGACCTAGCTAGGGGAGTTTATTTTCATCATTCCAATAATAAATGGTTCTTGATCCCTAGTATTTCTATTTCTGG
TCTAGTTTTGTTTTTTGGATTAAGTGTGAAGTCTGCGCCGTCATCTCGCAGCTTTTGTTCCCAGAACTGGGTTCTAGATCGACGG
TGGCAGGCTTTTTTTGTTTTTCTTTTCAAGTTATGTTTAAGCAATTGTTTGTCATGGGTGAAGTGAACACATGAATTTTATAAGCAG
CTTTACTCTGCTTATTTGGTTATCGAATATATCAACTATATGATATTTCTGTTTTTTATTCTATGGTGCTTCTAAGTTGTTGGGTTG
SEQIDNO: 451
TTTCATCATGTTGGTTACAGAAAAAACTTTCATAGTAGTTTATCCTTACAGAGTCTTAGGCCAAAGTCATGTATTCTTATACAAGG
TTCATGGTCGCCGGACAATTTTTTCTTTGTTGTCTGTTCATGAGAGTACTATTTTTGTTTTCTTTTATGTAAGAGTCTGAGTTTTCT
ATTTAAGAAGCAGTAAGAGGGTTTAGCCCTTTTTCTGCCGAGAGATGTTTTAACTGCGTTTTTTTTTATATGAAAGTTTTGTCAAT
GGATTATCGTTTTTATACATTTTTTACATTTAGGTAAAAGTAACGTGAGCCGGAT
SEQIDNO: 452
ACCATCCCTATGTTTGACACGAACTTTTCATTAGGATAATCAAGTAAGCTTTTTTGGAAAGTATCATATTTCATGATAGAGGTTCG
TTAATTCTCGATAAGAATAATAATAATAATATTTTCGAAATTGAAACTTGATTATAAAATTATAAGAAAATAAAATCTCAATTGCAAA
ATATATAATTAAGATTAAATGAAAAAAATATCTTAACATGTCATTTATTTTCTACATATTTATTTATCTCACTCATTATAACTCTTAGT
ATTTTAAAATTTATAATAAAAAATAAAACATGTAATTTTAAAATATAATCAGTGATAATATTTGTGAAATTAAAATCTGTGCAAAAAT
AGATAAGATGTGCGGCTAAGCCAAGACATTAATCATCTGAAAAGACTTAATAACGAAAGATTTTATTCAAATGAACGAATGCGAA
TGTTGAAACGGTGCCGTTCATTTTCTTAACCTAGTCACCTTGCTGAAACGGTGTCGTCATAGTAGCGCAGCTTTCCTGTTTAGTC
CTTGCCAGCTGGACTATGTCGAACCCACAAACCCCGACATGACATAAACACAAAGCGCGTGAAAATCAACCGTACAAGACCATC
GAGAAACCACACGCGTCAATCCCACGCGTCATTCCACGCTAGTGGCACATAATAACGTTCAAATAAGCAAACCGGGGCATAATT
GGAAACCTGATTAAACCCTAAGGTCATTATTGGAAACGAGAAGAAGCTCCCACAATATAAAAATCTTGGAACCCTAGTTTTATTA
TATTCGTGCTTCCTTACTCTGTTTCTCAGTCTGTGTCTTTGCGGCTGAGGATTCCGAACGATTGGCCTTCGCTTCTCGCTAAGGT
AGTAGCCTCTGCTCTCTTGTCTCGCTGATTTCGTTCATCTCTGTTTCTTGTTTACGATGATGATTCTTCGTATTTGTTTTTTAATTT
TAAATTTCCCGTTCTGTGATTTGTTTTACGTGGATTATCTACATTTTCTACCGATTAACGGAAGAGGTTCTCTTTTCGGTGTOGAA
CCTCGTTGTGTTCACAGATATATTGCTTTTGTGTCATAATTATGCGATTTTGTTTGTTCTTCTTTTGAGATTAGATGTTTTCAATGA
TTTATTGTGGTTTATGACTGGTTTATGTTTTCATGCAACAGTGTCTATATTTTTAATGACTTTTTTTTTATGGTGTCTGGAGTTTTCA
CCCACGTTTCAAGTTTGCCATGCTTTGATACAAAGCTTGCATAATATTTTAATTTAATTTCTATGCGTATATGTTTGAATCCTGCTG
ATGTTTTTATTGTTGCCCATTTTGTGAATTTTTTGTAACATGAAATTAATTTTTTTATGAAGTTGTTTTTGTTACTGCAAAAAAGAAA
CCTTTCGGGTATGATAAATCTGCCGGGAGTGTTTTTCGTTATGTTCTGTACGATTGTGCTTTGATTAAATGTATTTTTAATTTATTT
TCTTATATTTTGCTGGAGATGTCGAGTTGAAACTTTTTCTTAATGATTTGATTATTTTTCTGCTTGATTGAAAAGATTTTTCTACGCT
ATGATGAATCTGCCTTTTTAGATGCAGGCTGGTTCATATTTTGGAATAGAACTTTTTTGGCTTAACAATTTTTTGCAACTCTTCTTT
TACCTAATACATGTGTGAAGTTGGATTTACCTTGTCATTTATTTTGCCTGATAATTCACTTTCTAGCGATTGTGGCTTCTGATTTGT
GTTTCTTTGAATTGGTTTCAGTTTAACTCAAC
SEQIDNO: 453
agcttttggagagtttcatatctcatgatagaggttcgttaattttcgataagaatattaataataatatttccgaaattgaaacttgattataaaattataagaaaataaatctcaattgcaaaatat
ataattaagattaaatgaaacaaatcttttaacatgtactatttatttgtacatatttatttatctcactcattaaaacgcttaatattttaaattttataatagaaaataaaacatacgtaattttaaaatat
aatcagtgataatatttgtgaaattaaaatctatgcaaaaatagataagatgtgctgctaagccaaaacattaataatctgaaaagactatttagattttattcaaattaactaatgcaaatgttga
aacggtgtcgttgattttcttaacctagtcacctagctgaaacggtgtcgtcatagtagcgcagttttcctgtttagtccttgccagctggactgtgtcgaacccgcaaaccccgacatgacgtaa
acacaaagcgcgtgaaaatcaagtgtacaagactcccgagaaaccacacacgtcagtaccacgcgtcattccacgcgagtggcacacaataagttcaagtaagcaaaccggggcat
aatcggaaagctgattaaaccctaaggtcattattggaacgaaaagtagctcccacaatataaaaatcttggaaccctagattttattatcttcgtgcttccttgctccgtttctcagtctgtgtctttg
cggctgaggattccgaacaattggccttcgcttctcgctaaggtagcagcctctgccttcttgtttcgttgattttgttcatctcttacgatgatgattcttcttattttttttttccaattttaaatttctcattctg
tgttttgttttatgtggattatttatgctttctaccgattaacggaagaggttctcgtttcgatgttgaacctcgttgtgttcacagatctattgcttttgtgttataattatgcgattttgtttgttcttcctttgagat
aagatgttttgaatgatttattgtggatctgttattactgaactattatgaatggttttggttttcatgcaacagtgtctatgtttttaatgatttttttttgttgtctggagtttttgccccatgtttcaagtttgccat
gttttgatacaaagctggcataattttttaatttaatttctatgcgtaaatgtctggatcctactgatgtttttattgttgcccattttgtgaattttttgtaacatgaaattatatttttgtgaagttgttttttaatcc
tgcacaatacaaacctttcaggtacgatacgtctgcgggagtgtttttggttatattttgtacgattgtgatttgattaattgtatttttaatttattttttttatttgctggagatgtcgagttgaaactttttctt
aatgatttcattatttttctgcttgattgaaaagatttttctacgctgtgatgaatctgccattttagatgcaggctgattaatattttggaatagaacttttttggcttaacaattttgcaattcttctcttacct
aatacatgtgtgaagttggatttaccttgtcatttattttgcgtgataattcactttgtagcgattgtgggttctgacgtgtttctttgaattggtttcagtttaactcaa
SEQIDNO: 454
TGACAAGGTCAAGAAGGAGTTGCAATGTAACCTCCACATCTTGAATGTTAATTAAAGTTGTAAATTTCATGAAGAGGTTAGTGTT
CGTGGTATTATTAAGGATGTGAAACAAATTAGTATAAATAGTATCATCAAATAATAAATTAAACACCATATCATATTAATAAAGAAT
AAATAAAAAAATAAATAAGTATAAATATATATACATCGTTCGTTTTAATTTGTATCAATTTTAAAAAATCAATCTAAAATCTAATTTGA
ACAAAATAATTTTTATAAAATGACATTCAAACGCATTCTATAATATTCAGTCTTTTTAATACTCCCTCCGTTCTTTTATAAGTGTCAC
TTTCTTGCCAAAAATTTGTTTCTTTTTAATTGTCACTTGCAAAGTTCAAGGTAGTATTAATTGCAATTTTGTCAAAATTATCCTTAGA
TAATGATTGCAGAGAGAGAAAAAATAAAGTGAATGTAATAAATAATTAAGGGTATTATAGGTAAAAGAAGAATTATTGTTTGAAAA
ATAACAATAATAATTAGCTTCCTTGATATGCGTAAAAAATCAAAAAATAACACTTAAAAAGAAACGAAGAGAATAATATTTTAAAAT
CAATTTATTATTTTTATTTAGATCGGTTTGAATTTAAACATCAATAATATAATAAATTAAATAAATAAAATTTACATGTACAATTTATA
AAAAAAAACTCGCGTTATTAAATATTGTTTTAATATAAATTTATTAAATGACTTTATTAGGTCAAATCACTCGGCTAAGATTAGACA
GAAACCTTAAAATGCTCCCTCTACAATTGTTATGCCGCGGCGGAACGAAATAAAAGAAAGGGCAATTCCGTCAAAATAAAAGAA
ACAATTGTACTATATAAATCCCGTAACCCTTGTTTTGTCTCACTACACTATTGTATTTTATTCTCATTCTATTCCTCCTAGGGTTTTA
GCGCAGCTTTCACACTCAAAGGTAAATCTCTCTTTTTTTCGTTTATCATCGATTCTTATTATCGATATCATCGATTCTCATTATCGA
TATCATCGATTCATATGTTTTCTTTTGCACAATTTAGTGTACATATTTGATTACATAGGATCATTAGAAATTGTTTTGTTTTTCTTAT
GGTTCCTGCTATTAGATTTCGATAATCATGATGTGATTTATGTGTCTGTTTAATGGTTAATTGTTATTCTGAATCCTGATAGTGTGA
TAATCGTATATGTTTTTTTAATCGATAGTTTTTCTTTCGTATGGTAGTATTTATTTTTGGGTATAGATATATTCAGTCGAGATGCTTG
ATGCATATAATATGATATGATACATCTGATATTTTTAAATTGTACATGTGTTTGTTTTTCGAGTATGTTGTGCCTTCTCGATTCAAA
CATGCTATGTTGAAATTAATTCTATGTTATTTTGATTTGTCATATTGCTTTTTGTTGTCTGTATTTGTTTATTTATTTTTGTGGTTGAA
TACTGAGGTTTATTTTACTTATGGATTGTTTTCTGTGATGAAATTGTAGATCTTTTGTGATTTCAAGCTCAAGGACTA
SEQIDNO: 455
ACATGGTACACACCTCTGTCACCATAACTCCCGCCATCTTCTTTATGAAGATGGTTGACAAGACTCTATATTCTAACACAAACAC
CATTGTCAGAGGTTTCGTTGGTGGAGATAACTCTAGCTTCCCGAAGAAAACACACAAAGCAGGTGCTTGCAATAAATGTAATATC
TCTTGGTTTCCCAAGCGGCGCTTGAGGGAAAATAGGGGGTTATCATCACCTTTTCCAAGGAGGACACCCTCATAGTCAATCCTC
ACTATAATGACCCGTTGGTCATCACTGTGCAACATGACAACTTGGTTATCAAACGAGTATTGATAGATCCTGGTAACTCAACTGA
TATCCTATTCTAGGACGCCTCTCAAAAGTTGCAGATCAATCATGACGTCAAAATGTTCAACGACTCTTTAACAGGATTGTCATGC
GAACAAGTATAAGTAATGACTCATATGACCCTGGAGACCACATGTGGCGAGGGTGCAAACGCTAACGCGATTACGGTCAGCTA
CTTTATTAAAAAATAATTTATCATTTAAAAATTAGACATATTAATTTTAAATACAAAAGTATAAGAGGAGATCAAAACTATTAAATTT
AAAATAGAAGAATTACTTTCGTTAATAAAATTAAATAATAGGCAAAACTGTAATTAAACTTAAATAAAAATTAAATAAATAAAAAATA
AGAAAAAAATGGAATAAATGATGATTATAAAAGATTACTATTGCAAATTACCGTCCTATTATATATAAAAGATAAATAAAACGTAAA
ATAAATGATGATTTATGAGATAAATTAGTGCTGCAAATTAATTTTTTATACATAAAATATTTTTTATTCGATATCAATTTTTGTGGAA
TTGTATAATGCATTTACACTATTTATCATTATTAAATAATTAATAAACATTTTTTTTATAAATAATAATGATAATAATAATAGTAAAAA
ATATTTAATTAATTAATATTTTGATTTGAATAAAGTAAAGTGTATTGTAAAAGATTTGATTTTTCTGTAGAACATAAATAAATAATAA
ATATTTAAAAATTATATTTGATTCGGTAATTCACGAAAACTATGCTCCCGTCCTTTATAAACCCTCCAACCCTTCTTTTGTTAACAC
TACACTCTTTTCTCATTCTCCTCCCTGCGGCTGTGCATTAGGGCATTTTTCTCCTTCAAGGTAAATCATTCTCCGATTTCGTTTGT
TAATCGTGTATCAGTATCATCGTTACCATCGCGATTCATAGGGTTTTCTCACATTTTAGTGTATATGTATGTGATTACGTAGGATC
ATTTGATATTAGCATGTTATTGATTATTGTTTTGCTTTCCGATTTGTTATTCGATTCCGAAATCTGCCTAGGGTTTACGTGCCTGTT
TAACTGTTATTCTGAATCCGAATAGCGTGTTAATCGATTATGCTTTTGAATCGGTTGTTTTTTTTGTAAAACTACATATGGCTATTG
ATATTTTCCAGAGATTTTTCTGTTGTGATTCTTGATGCATATCATCATAATAGACGGAAATCTATGGATTTATATAATGCTAAATAT
GATTGTGTTTGTTTTCTGATCATGTTGTGTTCTTGATCTGCTGAGATATGTTGTGGTGTATTGTCTAATTTATAGTGTAATTGTTGA
CATGGATTTTGCATATTTGATTTGTCAGAATGTTGTTGATGCTGTTTTATTTAATTTTCTTTTTTAATGCTGGTGTTTATTTTACGTG
TGTTGTTTTCTGCTTTTGATTTGTAGATTTTGTGGTTTTAAGCTTTAGTTCAA
SEQIDNO: 456
AACCAACGCATATGATCAACTAACCCTATTTGAAATACATTGTTAAAAACACTCCATTCAACCCTAAACTAAAAATGCTAAATACC
ATGACATTTTCAACATTCCTCTTGTGCGGACAACCTCAGTCTTTAACTTGAAAAATTTATTCTTTTGCCTTTCAATCTTCAAATTCC
ATCCATCAACAATTTCATCACATAACCACTTGAAAAAATTACATCCCTTTTCCATTTGATTTATGTAATTCTACAACTCCATAACTTT
TTTCTAACATTCACACTGTTCATATATGTAACTATAAGAAGAACACACCCCTCGTGGCAAAAATCTTCCCTCTTCTTGTTTTTTTTA
GCACAAATCCAAATATCCCATAATTACCGAAACACTTTAACATTTGAACATAAATTTTGAAATTATGAAAAAAATGGTAGAATATTG
ATATAAGATGTTTGTTGAGTTAGGAATTTTGCCTTGGAGTCATGCCACATCATCCTACATTAATATATTTTTTTCAAAATTTAACAA
AAAAAATTAAATTGGCTAACAAAATTAAGATTAACTAAAAATTAACTTAATACTTCGCCACTAATTAATTCTTAGTAAATTCAATTCA
AAATTTTGTAGTTGCTTAATAGAGATGGAACTCGAAATCTTTCATATGAAAAAACTCAGAAAAGCATATTCTCACGCGTACACACG
GCGTGTGACTTCAAACTCCAAGAAGGACCTAGAAGAAAATCCACGAGAGAAATACAGTGTACACACGTATTTCCTTATGAGGGT
GAAACAAACGCAACGTTCAAATAAACAAACCGAGGGCATTTCAGGAAATTCATAAGAAAACCAAGGATACTATTGGAATATAAAA
AATATTTTTCTCACTATAAAAAAACTTGAACCCTAGTTATTTCATTACCACTCTTTACTTGTTCTTAAATAGCTCAGTCACTCTGCG
GCTGAGGATTCCGAACGAGTTTTCTTCGATTTCATTTCTGCTGAGGTAAAATTCTTCGATTCATTTCTCTTTGATTCGATCTATTG
TGTTTATTTGCTGTAGTATCATATGTATGATTTTGTTAGGTTAGTTTGATTTTGGTTAATTTTGTTTAGTGTTTGAGAAATTTGTATT
TTGAACGAGTCGATTTGTGTTCGTAATCTATGATTTAATTTAGCTAATTGAGTCGATTGGTTTTCTGTATGTATAGATCTGATGAAT
TTTGGTTCAAATCAAGTAATTTTATTTTGAAAGTTATGAGCTTTTTGTGGTATGGTTGTTTAATTATGGATCTGTTAAGATTAGACT
CTGATTCAATTGATGATTGTTTAATTGATGAAAATGATATTTTTTTGATGGAGATTTGATTGTCTCTTTCTGATACTTTAAGCAGTG
GCATATTTTACCTTCAAAATTTTTGATTTTCTATTACTCGTTTTTATATGCTATAACACGAGTTGTTGATATGTTTCGAAACTTTAAA
AATTGTTTATTGTGAGTTAATTTTTCTGATTAATTGGTTAGTTTGGAGGTAAGACTCTTATTTAATCAGGGTTTGTTTTGGTTTGTT
TATGATGCAATGTTTTGATTTAACTGTTTTATTAGATCTTATTTGTGTATCTGGTTTTGAATTTGTTGCTGTTGATTTCTAGCTTATT
AGTTTTGAATTTGTTTTGAACTTCATAACATGTTCAATTGCTGTTCTTTAGTTAATATAATTTATTAGTTATGACCATGTTGAATTGC
TGTTCTTTTTGCTTATTAGTTCTGACTTTTGAATTTCTTTTTGTGAATTGCAGTTAAGATATC
SEQIDNO: 457
AGTCAAGAACGTCGTAGCTACATAATTCATACAGTCCGAACAGTCAGAGTAAAGTGAACAGTCATTGCATGCATTGTTGTATGGT
TATGGTTGGAAATGTATGATTGGTTGTTGCGTGATGGACTTATTGATTTATTTCAGATTTATGTGAGTTATCTGTTTAGATAGTTAA
TTAAATTACACTAGCTTACCCTTATTTTCCTGTATTGTCATGTTGTCCGTTCGGTCGTCCTTGTCTTTGCGATGATCACCCTGTGG
GTGTGAGCAAAAGGTGTAGAAGCTTCTCTGGAGCAGGCGCTGATAGAAGAGGATGGTCTCCGCTAAGAGTAAGACCGTTCGGA
CTTGACTTTGTTTTGGTATTTAGTATAGGACCGTTCGGTTAATACACTTCTTGTATGACCCCTTTTGAGTTGTATCAGTGTAGGTT
TCTGTAAAGTTTTTAATTTATGATTATTTTAGGATAACTGTAACTCTGTTCTATTTTTATTGTAAATATAAGTACTCTTGAATATAGTT
TGCAGCTATATTTTTGGGATGTTACAAATATTTGAATAGGTATTATTATTTTGCCACCCAATAAACTTTTACACACAGTTTACATTT
ATTATTTTATTCTTTAATTTTTCTCTTTCTTTTTAATTTTTTTTAATGACTAAAATACTCTATAAATAAATTTTCAAAGCATCTAAAATA
AAAAAGAATCACTCATTTAAATACGTAAGGTTTTGTATCATTACTAACCACCCTAATTCTTCTTTGTATCTTGTGCCGCCAGAGAA
AATAAGGCAACTAGGAATTGGCGTAAGAAGTGACATGATCTTCTACGATTTCTGCAGCACATATTCTACACATACGAATATCTAA
ACCATTAATTACACTCTATTTCTAAATTATCTTGTTGACGGTTGAGATTCGGCTATGCAATGGTTTAGACAAAACAATCGGCCGCA
GAGGATCTGGTTTGGCGTGAGGTTGGATTTTCCGTTGACGCCACGTCAAAAGAGCAGGGATACAACTAGAAATAAAGTTAAGG
GTAGTAACGCCAACAAAAATGAACAACTTGCAGTGTATAAATTCTCAGTCCCTCTTAACACAACATTCTTCTTTGCTACACTCTCT
TCTCGCGGCTAGGGTTTAAGAGCAGCTTCTTTCTTCAAGGTTATTTCTTGTTACTCACTTTCTTTTCGTTGCTTCCTTCATGTGTT
AGCCTTTATATTAGTTAATTCCTCTCCATTTACTGAAATAATTGCTGTTATTTGATTTGATTTTGGTTCTGCTTTATCTGCCTGCTAA
ATCGAAATTACCAATCCAAACAGTGCGATTATCGTGTCAATTCGAATTATTTATTTTCTTGGTCATTCCAATATATAGATGTTGGTT
TCAATCAATGTTTTTACCTAGAGCTTGGGGTCTCACGTGATGGTGTGGATATCCATTTTCATATCGTAATGTTATTTTAGTTTAAA
GCCATTATGTACTTCGTATTGTGGTGAAGTCTATATCTAGCTTTTACTCAATCTTTAATCCGTGGGGTTCCTTTTTCTTAGACATAT
CTTACCGATTCGAAAACTGTTTTATTTTGTCAACCCCGTGATGTCGTTGCTGTATGGATCATCTCATTTTATTTTCTCTTTGAGAAT
TAGGGTTAAGGATTCTGGGAAAGTACTTTTTGCAGATTTTGTTCTGTTCTTGGATGATTGACTGTTGATTTGAATGGGCAGATCTT
AATTGTTTCAATTTAGAGGACGA
SEQIDNO: 458
AACTCCTCCAAATTCGTCCAACAACCACTCCCTAATGACGATCATAGTAACAAAACCTCAATCTCTTCTTCAAAAGAGACGGTGC
ATAAAGTATCATTAATTTGCACTTGCTTCACCATCTTTGCATCTCTTCCTATAAGGATTTTGACGTGCAGCCGAGCGAACTCAACA
ACCTCCTTTGTTAGCGTGGCATTGTCAACCTCAACTAACGAACCGACAAGAGACCTAATAAATTCGAAACACTGGCTACTCCACA
ACACCAACGGGATACATCTACAGCGAACTCAAACAAATTTTTCACCTACCACAAAGTTATCGTCCCAAGGGACAAGAGACTCGA
ATATCCCATCTAACCATTCTTTATTTTCGACAACTAACTTCTCTAAGAATCCCACTTCATCACAGGATAACAACCCAAACTTCTCC
CCTAGAGACCTCAGCTTCACAGAATTAACTCCACTCAAAATAAAACTTTCCTTAATAGACTGCACATTTTTTAACTCAAAGTCTCC
CTACAAAGCAATCCTCCAACCACTTTGTAGAATCCACCACGACTTGAAAGCAGACCATGCTGGCGTCCAAGACCTTCTTAGAAG
CAGACTCGTGACCGTCCCTAACCACCTGAGCAAAGGATCTTTGTTGAGCCTTCTACCTCCAAGCCTTCCTTACATGTTCATGTTT
CCTTATCCAACTCGGGTCTGTGTGGTTCCTTCCTGCTAAACTTAGGTATATTTACCTGCAGCTTCCAAAGACCTATCCAATTAGC
GTCTAGTTTCCTTTCTAAAACGTGAGCATCCAACATCCCTTGAAATCTCACGAACCCAAAGTGCAGTTTACCATAATCTAACCTTC
TTGATATGAATACGTCGATAATCCTTCCCCACCTCTGAAAAATCTTTCACATGTCCCTCTCCATGTACTTATGAGGAAAGTTTGTG
AAGAATAACTTCACTTCCGCCATTCTTCAGCAACGTCTCTCTCTCTTACAACCCTAAACCCCAAATATTCAGCATAGAACAGAAT
GATGTTAGTTTATGTCTATGTAATAGGTTGTTTTCTTTTTATAATAAGTTTTTAATATGTTTTTTTTTTTCTATCTTCTCCTCCTTTTC
TTCTTTTTTGTTGCACAATTTTTTCTCTGTTTTTTATAGCTTATGATTGCAAAAAAGATAAGTTCAATAAAATCATAATGGATGACAA
ATTATCCATGCAAAATTAGATAGAAAATTAGCAACAATTTTAACGTGTGTTTGTGTTTAACGAACTTGTTTTGAAAAGTTAATACTC
CAAATTTGTTGGTGTGTTGACATTAATTGTTTTAATAACTATTTTGTGATGAAAAATGTGGAAGGAAGACTTCTCTACGGTGTTAC
TTGCCACCCAAGGCTAGATATTGTTTATGACCTTTTTCTAAAATAAGAATGGTCTTCTATATATGTACATAACTTGCTACCCAAGG
CCAGATATTGTTTATAAACAAATCCCTCTTAAACAACCACTTATCTCTGCTACACCTACT
SEQIDNO: 459
gagtataaaacccaaaatcaattacagttaccataatataaattttggaacctctaaaatttaactaaacaaataaggatatactaatttaaaattatttgatatttcattcatatacataaaagttg
acgtaatatatacttttaaaatacacataactatgaatagtttaattactttttattatttttcaaatttgacaaacatttaaattattatatagttataattcaatgttttgattgataaaatacactttctgttta
aagctattactggtgtaaaagtttatgtgtatatcctttttttaaggcacatgttattgataaactttcacttatttttaaaagaaacatgctgataatttacaacttgaatttgctaataagcttcaaaaa
gtgtagatttattaaaataagaatatatttgttgatcccatctcgacacttaatattgacattacaactagtcgtaattaaacaatcgaatcaattatcaataaattttttatgcaaattaactgtatcac
aattattctatatatctttaccggtatctattgatgctatttgctaccagagggttgtaccactaagagaagctactgtattgactataattaataagtaaaatacataggcatccagaatcttctgtttt
ctaacaaaagactacaaaaagggaatgcaaaaagacagagaagaacaattccactaagccgcccaaccactagtgatcaatggtagtattaattattgaacaattccaaattgtcattga
aataaggccgaacaaacattctattttaaatgttggcttcattatttatcgatctggaaaaagaaatactggcattattaattaatagtcaatgaataaaaacgtgagcacatgtaatacccatgt
acaatcatcggagtttatgagccacgaatatgaggagtctcattcatatatctctctgtcggctgtcatagtggaaaaaaaaaatgcccgttaaccatattattgccaccattgttatcatcatca
attaattttaccctccttttgttaatttgactaaatggaaaacgacgtctcaggtctcacatgtgtgtgtcttttcttttctttgtttttttaatgcaagtggatcgttgagtatgataataatatttgcttaggat
gcttatccatccaatttttatttttttttaagttcctcgtttattgtacatcaattaattaattactattgagctcatgactaagaaaataaacatgaacacaaatcataggatttttaaaatactgaaaag
agtatactaaggggttagataggtcctcgattattaatcaagcgttatccaaccactcttgtgggtccatggtcggtgcatgacaaccaagaatggctgtacattcacaatcaaatccattatatt
tatgtagtttcttgttatataaacctaagcaaaggtttatgaggcagcactaatttatatagcaagctagctaggttgaaaatagtttggttttgtagtaagtgaggtgaggtgccaaa
SEQIDNO: 460
aagtatttaggattcctataacaaaatgattttttttttttttttgattgaacaaaatgattattcttaaacaattagaaatagtatattttttagaattaatgtttttaaaacgcttgtcagtcgaatctttaa
aaataatactttaatttaattaaaatataaacattgcaagtaaaagttgaatagaattttccagttcagaggaagctaaagaattaaggttagcttacaccgttgaccctgatgcatttggcttcgc
aatttgacatattttctattcagccaagtgggaattttgcaagagacaactcatcacagatgggcgcatacataattatccattcattcattcatagcgcctaagaatttctctccatgtagttgggt
caaaatagcacttagactgattgggactttttcttttcttatttttgtcaacctcctcaaatttgactgtagtaaaagggccatgcacattactgacttatcttatagtttctactttcttccttatatttaatta
gaaaaaaattctaagaatggaatttctcataaaaataatgtgtgggaaatgaaagcccccttgccgtttgtttaggtattagactgcgttggcttttccataactgtacagctcttgcacacttcttgt
ttgcttgccccttctgagacacaaggggacaaaacaaataattaaagatataaacttcaatctacattacattctcttgggaagggaggaataggatattaggatatcaatagtatattcacatt
tggatttggatgagctctagattcttattaggcaattctagagttatataatataatattgaatattaaatttactttatttttgttgtgatttatttcaattttactttgtcactgtctggtttttaaaagtgtcaaa
ctttaaagtttattttactgttaaattttattcaaaatctgtatacagaaattcttgtatccaatttaaatttttatgtaaatattttatgttatgggaacataagatatgaagcatgtaaaaaaaatcacga
ttgatttcgtgatatataaagagcaattagaaaccacaaaggaaaaaagtgttgtcggaccaatgctcaacaagaaacagtgatagtgtgatacaacaaaaaattgaaccgggctttccttt
aagattttaggcataccgttaatgtctttttttgtttttgacgttgatgtctgtttggtaaaattgaagaaagagctgaatcaggttgggaacttgggacaaacctgtaatctatctaatgcattatatgt
acttgcatgtggccatcataaactccaagcacttggggagaaggagaaaatagaaaaataaataaataacaaagtcaactgatcaaaactaaattaaattttgaaaaccgactccatgtc
tccatatgtacaatcatcacccggtgctgcttctcaacaggctggcctttcaaactgtttaagggatatatctctaccacttgcttgcttctgctattatttttaattttatgctgtagttttggaatttgagc
cttttgattgtcttttggaaaaaaaaagttaaatataagtaaaaaggaaacgttttgtatgaaagtgtgatgtaaatttctttatatcatcgttaatgtaaatatgtcttatttttagttccctcaatttttca
acattttcatacttgtcatttctcaaaattcaatttgtttttatttccctatatttttatggaattgggctttatataaaggctttacattcagtgcatccccactcagaatcttagaatatcaatcactccgatt
cctgttggttgttctctcaagtctcaactcccaccccccctctttgacttttctatcagaagagcttgttggagttgaaaact
SEQIDNO: 461
gaattcacaaacacttttgacagcgttaatggaagatatttctttaggttcgagattgaaacttgataaaggatggttacctagttgtctttcctgctgtgccacgtacgaaaagattttgggtattgt
gggtattggatccatcagcaacacatgagaatgtatattgtcatactgctcattcaaccctcgcaggaactgcatcgtgcgatcttcttgctttcgttgagctatggtggtgagtaccaagcaagt
acacttgacagtgcatggcatacggggtttggcctgaagttttcaatctcatcccatatgacccgcagcttcgtgaagtattctgttactgagagagaaccttgcttaatggatgaagcttcttgtt
ggagttcagaaactctcagaaggtccccttgcgcgcacctagacttcagatcattccaaatctcttccgctttgtccatccacaagacactttgtctaatggggatggatactgaatgaaccaa
ccaagacactaccatgttattacagcgactccatgccccgtgagttctatcatatttcaatggctcgggtgcttttccatttacaaactctactttgttcttggcgcttaatgccgtcatcatggaccta
ctccatgaatgataattgctagaatctaaaggaggtgaaaccagtgcaacagctaggttctcacttgggtgaaggtaaagataactatctgtgcttagcattgactcgttcatggtgagaaag
cagatgagaggaaaacacgggagtgtaaaagagagaggtgacacagcagaactcttcttcaagaagagctctgataccatgttaataaaggtattgtgccatagagagagaaagata
agcgtgaatcacgtgtaaaatgaccaaatactgcatgccttgtattgatgcatttattatgtatttatatctctgcagagtttgcagaggagagagaaaacgttggtaattttagtcagttacactcg
agaaccaattctaactaactaacaaaaaactaattgatgaaacgaacttatgttaagataacaagcttccgctaagatgggcattccttctcttaaaaatgtatttcttttgtatatcatgaccgaa
tccgttaattaaccttgttagtgtattgtgaaaggtcaaaattacccttcatacttcaatccctcatttcgctactctccaacatgttctggaaatcccaaattaaaaacctcaaaatgtgttctgctag
ggtttgagttctctctcaggtttgatgcccatcattttttgtgtgttaggatttcaacggccaccatatgcgtcattttgggttaaaagtagatttctctactaatttttttagtgttagacaaattgtgatttgc
gtcaaattgtgaaacttttaatataaaaacaaatgaaacccatatctatgatcaataactcacaaatgcatgaaaaaatcaaacaatagttgttgaactgaaaaattattgataatttagaatttt
ttatataagactaaactggttataaataaagtttgatcattatgaaatatgaacttataactttctaattatotttgaagtatctaatcatgtaacattattataaaatattcttatttttactttatcattatca
ataaattaactagttaattattccacttacttggttgaagactactttgaacctatctttttactctcttctcaatgttttogtttaaacaattactgagtataacttaataataaatacataatacatataaa
aagatcgatgaaacaccctagtaattaattataaaataatttagttttaatacggcataacaaatttacagtctcaattaatataaaatgttataaaaatcatcaatattaaaactgtttcatttaatt
aaattcattataaaatgtttgccggtcaaatgtaatagacacagacacggagaatataatacaaaagtttcattactctctctctctctctgttgaataaccctccacaaccaccttattcaatcttt
aaatagcttattgattaatgtcttatagtc
SEQIDNO: 462
aaaGAATTCACCATCCCTATGTTTGACAC
SEQIDNO: 463
aaaCTCGAGTTGAGTTAAACTGAAACCAATTC
SEQIDNO: 464
aaaGAATTCAGCTTTTGGAGAGTTTCATATC
SEQIDNO: 465
aaaCTCGAGTTGAGTTAAACTGAAACCAA
SEQIDNO: 466
aaaGAATTCTGACAAGGTCAAGAAGGAGT
SEQIDNO: 467
aaaCTCGAGTAGTCCTTGAGCTTGAAATC
SEQIDNO: 468
aaaGAATTCACATGGTACACACCTCTGTC
SEQIDNO: 469
aaaCTCGAGTTGAACTAAAGCTTAAAACCAC
SEQIDNO: 470
aaaGAATTCAACCAACGCATATGATCAAC
SEQIDNO: 471
aaaCTCGAGATATCTTAACTGCAATTCACA
SEQIDNO: 472
aaaGAATTCAGTCAAGAACGTCGTAGCTA
SEQIDNO: 473
aaaCTCGAGTCGTCCTCTAAATTGAAACAA
SEQIDNO: 474
aaaGAATTCAACTCCTCCAAATTCGTCCA
SEQIDNO: 475
aaaCTCGAGTAGGTGTAGCAGAGATAAG
SEQIDNO: 476
aaacGAGTATAAAACCCAAAATC
SEQIDNO: 477
aaaCTCGAGTTTGGCACCTCACCTCAC
SEQIDNO: 478
ATGAATTCAAGTATTTAGGATTCCTATAACAAAATG
SEQIDNO: 479
AACTCGAGTTTTCAACTCCAACAAGCTCTTC
SEQIDNO: 480
TGCGTCCACAGAATTCACAAACACT
SEQIDNO: 481
AAGTCGACTATAAGACATTAATCAATAAGCT
SEQIDNO: 482
AATCTAGACGATCTCTCTCAAGGGACCTTGCT
SEQIDNO: 483
AATCTAGATATTGCTTCTTATACAGATCTAAGGCA

### REFERENCES

[0221] U.S. Pat. No. 5,254,799A, 1990
[0222] U.S. Pat. No. 5,561,236A, 1990
[0223] U.S. Pat. No. 5,495,071A, 1993
[0224] U.S. Pat. No. 5,627,061A, 1995
[0225] U.S. Pat. No. 5,914,318A, 1997
[0226] Castiglioni, P., Warner, D., Bensen, R. J., Anstrom, D. C., Harrison, J., Stoecker, M., Abad, M., Kumar, G., Salvador, S., D'Ordine, R., Navarro, S., Back, S., Fernandes, M., Targolli, J., Dasgupta, S., Bonin, C., Luethy, M. H., & Heard, J. E. (2008) Bacterial RNA chaperones confer abiotic stress tolerance in plants and improved grain yield in maize under water-limited conditions. Plant Physiol. 147(2):446-455.
[0227] Domingos P, Prado A M, Wong A, Gehring C, Feijo J A. (2015) Nitric oxide: a multitasked signaling gas in plants. Mol Plant. 8(4):506-520.
[0228] Gaudet P., Livstone M. S., Lewis S. E., Thomas P. D. (2011) Phylogenetic-based propagation of functional annotations within the Gene Ontology consortium. Brief. Bioinformatics 12:449-462.
[0229] Karaba, A.; Dixit, S. A.; Greco, Raffaella; Aharoni, A.; Trijatmiko, K. R.; Marsch-Martinez, N.; Krishnan, A.; Nataraja, K. N.; Udayakumar, M.; Pereira, A. B. (2007) Improvement of water use efficiency in rice by expression of HARDY, an Arabidopsis drought and salt tolerance gene. Proceedings of the National Academy of Sciences of the United States of America 104 (39): 15270-15275.
[0230] Kasuga M, Miura S, Shinozaki K, Yamaguchi-Shinozaki K. (2004) A combination of the Arabidopsis DREB1A gene and stress-inducible rd29A promoter improved drought- and low-temperature stress tolerance in tobacco by gene transfer. Plant Cell Physiol. 45(3):346-350.
[0231] Mega R, Abe F, Kim J S, Tsuboi Y, Tanaka K, Kobayashi H, Sakata Y, Hanada K, Tsujimoto H, Kikuchi J, Cutler S R, Okamoto M (2019) Tuning water-use efficiency and drought tolerance in wheat using abscisic acid receptors. Nature Plants 5(2):153-159.
[0232] Nelson D E, Repetti P P, Adams T R, Creelman R A, Wu J, Warner D C, Anstrom D C, Bensen R J, Castiglioni P P, Donnarummo M G, Hinchey B S, Kumimoto R W, Maszle D R, Canales R D, Krolikowski K A, Dotson S B, Gutterson N, Ratcliffe O J, Heard J E. (2007) Plant nuclear factor Y (NF-Y) B subunits confer drought tolerance and lead to improved corn yields on water-limited acres. PNAS 104 (42) 16450-16455.
[0233] Takahashi F, Kuromori T, Sato H, Shinozaki K. (2018) Regulatory Gene Networks in Drought Stress Responses and Resistance in Plants. Adv Exp Med Biol. 1081:189-214.
[0234] Vogel J P., Garvin D F., Leong O M. & Hayden D M. (2006) Agrobacterium-mediated transformation and inbred line development in the model grass Brachypodium distachyon. Plant Cell, Tissue and Organ Culture 84: 199-211.
[0235] Weigel D, Ahn J H, Blezquez M A, Borevitz J O, Christensen S K, Fankhauser C, Ferrendiz C, Kardailsky I, Malancharuvil E J, Neff M M, Nguyen J T, Sato S, Wang Z Y, Xia Y, Dixon R A, Harrison M J, Lamb C J, Yanofsky M F, Chory J. (2000) Activation tagging in Arabidopsis. Plant Physiol. 122(4):1003-1013.
[0236] Yang S, Vanderbeld B, Wan J, Huang Y. (2010) Narrowing down the target: towards successful genetic engineering of drought-tolerant crops. Mol. Plant 3(3):469-490.
[0237] Yang Z, Liu J, Poree F, Schaeufele R, Helmke H, Frackenpohl J, Lehr S, von Koskull-Döring P, Christmann A, Schnyder H, Schmidhalter U, Grill E. (2019) Abscisic Acid Receptors and Coreceptors Modulate Plant Water Use Efficiency and Water Productivity. Plant Physiology 180(2):1066-1080.
[0238] Yoo, C. Y., Pence, H. E., Jin, J. B., Miura, K., Gosney, M. J., Hasegawa, P. W. and Mickelbart, M. V. (2010) The Arabidopsis GTL1 transcription factor regulates water use efficiency and drought tolerance by modulating stomatal density via transrepression of SDD1. Plant Cell, 22, 4128-4141.
[0239] Zhu J. K. (2016) Abiotic Stress Signaling and Responses in Plants. Cell 167(2):313-324.

The application's sequence listing, which the Patent Office published only in electronic form, follows.

SEQUENCE LISTING (483 sequences)

SEQ ID NO: 1 - DNA, 16 bp, synthetic construct
  misc_difference 1: note = n is a, c, g, or t
  misc_difference 11: note = n is a, c, g, or t
  source 1..16: mol_type = other DNA
ngtcgaswganawgaa

SEQ ID NO: 2 - DNA, 16 bp, synthetic construct
  misc_difference 5: note = n is a, c, g, or t
  misc_difference 10: note = n is a, c, g, or t
  source 1..16: mol_type = other DNA
tgwgnagsancasaga

SEQ ID NO: 3 - DNA, 16 bp, synthetic construct
  misc_difference 5: note = n is a, c, g, or t
  misc_difference 10: note = n is a, c, g, or t
  source 1..16: mol_type = other DNA
agwgnagwancawagg

SEQ ID NO: 4 - DNA, 16 bp, synthetic construct
  misc_difference 5: note = n is a, c, g, or t
  misc_difference 10: note = n is a, c, g, or t
  misc_difference 13: note = n is a, c, g, or t
  source 1..16: mol_type = other DNA
sttgntastnctntgc

SEQ ID NO: 5 - DNA, 15 bp, synthetic construct
  misc_difference 1: note = n is a, c, g, or t
  source 1..15: mol_type = other DNA
ntcgastwtsgwgtt

SEQ ID NO: 6 - DNA, 16 bp, synthetic construct
  misc_difference 5: note = n is a, c, g, or t
  misc_difference 10: note = n is a, c, g, or t
  misc_difference 13: note = n is a, c, g, or t
  source 1..16: mol_type = other DNA
wgtgnagwancanaga

SEQ ID NO: 7 - DNA, 27 bp, synthetic construct
  source 1..27: mol_type = other DNA
tccaaccacgtcttcaaagcaagtgga

SEQ ID NO: 8 - DNA, 25 bp, synthetic construct
  source 1..25: mol_type = other DNA
tcaagatgcctctaccgacagtggt

SEQ ID NO: 9 - DNA, 25 bp, synthetic construct
  source 1..25: mol_type = other DNA
tctgtcacttcatcgaaaggacagt

SEQ ID NO: 10 - DNA, 25 bp, synthetic construct
  source 1..25: mol_type = other DNA
acatggtggagcacgacactctcgt

SEQ ID NO: 11 - DNA, 28 bp, synthetic construct
  source 1..28: mol_type = other DNA
tgaccatcatactcattgctgatccatg

SEQ ID NO: 12 - DNA, 25 bp, synthetic construct
  source 1..25: mol_type = other DNA
tggacgtgaatgtagacacgtcgaa

SEQ ID NO: 13 - DNA, 25 bp, synthetic construct
  source 1..25: mol_type = other DNA
aggtcaaaccttgacagtgacgaca

SEQ ID NO: 14 - DNA, 24 bp, synthetic construct
  source 1..24: mol_type = other DNA
tgggtgagattccttgaagttgag

SEQ ID NO: 15 - DNA, 27 bp, synthetic construct
  source 1..27: mol_type = other DNA
tgaggagagtcctgagcttggtgtggt

SEQ ID NO: 16 - DNA, 25 bp, synthetic construct
  source 1..25: mol_type = other DNA
acgttcaagaacaggcacagcgtca

SEQ ID NO: 17 - DNA, 25 bp, synthetic construct
  source 1..25: mol_type = other DNA
tcctcgtatccaagtgtgttgcagt

SEQ ID NO: 18 - DNA, 28 bp, synthetic construct
  source 1..28: mol_type = other DNA
tggctagattatacgagatgatagagga

SEQ ID NO: 19 - DNA, 25 bp, synthetic construct
  source 1..25: mol_type = other DNA
accgatcatcaatggagtcttcgga

SEQ ID NO: 20 - DNA, 26 bp, synthetic construct
  source 1..26: mol_type = other DNA
tcgactacacgtcatcacggtctcca

SEQ ID NO: 21 - DNA, 24 bp, synthetic construct
  source 1..24: mol_type = other DNA
aagagatcttcatgtgctccacca

SEQ ID NO: 22 - DNA, 25 bp, synthetic construct
  source 1..25: mol_type = other DNA
tcgtctcgtacctatagctagtcac

SEQ ID NO: 23 - DNA, 26 bp, synthetic construct
  source 1..26: mol_type = other DNA
ttcggaaactctaaggaacaagtgtg

SEQ ID NO: 24 - DNA, 22 bp, synthetic construct
  source 1..22: mol_type = other DNA
ttggcaatggccctatgagatg

SEQ ID NO: 25 - DNA, 24 bp, synthetic construct
  source 1..24: mol_type = other DNA
tctcggagattagacgtcgtgact

SEQ ID NO: 26 - DNA, 25 bp, synthetic construct
  source 1..25: mol_type = other DNA
tggtaatggattcatcggagtagac

SEQ ID NO: 27 - DNA, 23 bp, synthetic construct
  source 1..23: mol_type = other DNA
tgtgtcctccttcacaccaagca

SEQ ID NO: 28 - DNA, 25 bp, synthetic construct
  source 1..25: mol_type = other DNA
actatgaggatacaaggcatcctga

SEQ ID NO: 29 - DNA, 24 bp, synthetic construct
  source 1..24: mol_type = other DNA
atcatactcgcactcattagtcat

SEQ ID NO: 30 - DNA, 25 bp, synthetic construct
  source 1..25: mol_type = other DNA
tgttgtagtaattgttgcgtaggct

SEQ ID NO: 31 - DNA, 30 bp, synthetic construct
  source 1..30: mol_type = other DNA
agtgacttggttgagcatttcactcctctg

SEQ ID NO: 32 - DNA, 31 bp, synthetic construct
  source 1..31: mol_type = other DNA
agctgaccatatattgatcttagctccgtct

SEQ ID NO: 33 - DNA, 33 bp, synthetic construct
  source 1..33: mol_type = other DNA
tagaattcaactacttgatgtggtttacgccat

SEQ ID NO: 34 - DNA, 33 bp, synthetic construct
  source 1..33: mol_type = other DNA
aactcgagtgtacgtatcagacacttgcaagca

SEQ ID NO: 35 - DNA, 34 bp, synthetic construct
  source 1..34: mol_type = other DNA
tacccgggatggattaccgatcatcaatggagtc

SEQ ID NO: 36 - DNA, 32 bp, synthetic construct
  source 1..32: mol_type = other DNA
ttggatccttaagctagtgagtctaagcacca

SEQ ID NO: 37 - DNA, 24 bp, synthetic construct
  source 1..24: mol_type = other DNA
tgagagagttgctcagcttgcttg

SEQ ID NO: 38 - DNA, 24 bp, synthetic construct
  source 1..24: mol_type = other DNA
aatgaacatcatacccgagatagg

SEQ ID NO: 39 - DNA, 32 bp, synthetic construct
  source 1..32: mol_type = other DNA
aagtcgactgcttgcaagtgtctgatacgtac

SEQ ID NO: 40 - DNA, 33 bp, synthetic construct
  source 1..33: mol_type = other DNA
aatctagaccaatgttattcgacattacactac

SEQ ID NO: 41 - DNA, 31 bp, synthetic construct
  source 1..31: mol_type = other DNA
ttagatctgattaacgcaacatatttgaggt

SEQ ID NO: 42 - DNA, 32 bp, synthetic construct
  source 1..32: mol_type = other DNA
aatctagaatgccaaattaccaccacaatcac

SEQ ID NO: 43 - DNA, 35 bp, synthetic construct
  source 1..35: mol_type = other DNA
aactcgagacttctccccactcttaaattgttgag

SEQ ID NO: 44 - DNA, 33 bp, synthetic construct
  source 1..33: mol_type = other DNA
aatctagaaatcagaagtaatgcttattcgact

SEQ ID NO: 45 - DNA, 35 bp, synthetic construct
  source 1..35: mol_type = other DNA
atgaattctgcatgtgacatttagaccttatcgga

SEQ ID NO: 46 - DNA, 32 bp, synthetic construct
  source 1..32: mol_type = other DNA
ttctcgagaagtaatcaaaccctttattcctg

SEQ ID NO: 47 - DNA, 31 bp, synthetic construct
  source 1..31: mol_type = other DNA
aagtcgacaataccttctcacaccttctcca

SEQ ID NO: 48 - DNA, 33 bp, synthetic construct
  source 1..33: mol_type = other DNA
aatctagagcatctcacacaacacacactcgaa

SEQ ID NO: 49 - DNA, 32 bp, synthetic construct
  source 1..32: mol_type = other DNA
aactcgagtgcaagttggagcaatagtacctc

SEQ ID NO: 50 - DNA, 32 bp, synthetic construct
  source 1..32: mol_type = other DNA
aatctagatgcatactagatatttgtatcggt

SEQ ID NO: 51 - DNA, 32 bp, synthetic construct
  source 1..32: mol_type = other DNA
atctcgagaacaagatatgctgaattggagca

SEQ ID NO: 52 - DNA, 31 bp, synthetic construct
  source 1..31: mol_type = other DNA
tatctagatatgcacagagaatatcattgca

SEQ ID NO: 53 - DNA, 30 bp, synthetic construct
  source 1..30: mol_type = other DNA
atcgccagcctcgagatcgatctctctcaa

SEQ ID NO: 54 - DNA, 32 bp, synthetic construct
  source 1..32: mol_type = other DNA
aatctagacgatctctctcaagggaccttgct

SEQ ID NO: 55 - DNA, 35 bp, synthetic construct
  source 1..35: mol_type = other DNA
aatctagatattgcttcttatacagatctaaggca

SEQ ID NO: 56 - DNA, 34 bp, synthetic construct
  source 1..34: mol_type = other DNA
aactcgaggtttcagagttcagagagcttgatcg

SEQ ID NO: 57 - DNA, 35 bp, synthetic construct
  source 1..35: mol_type = other DNA
aatctagaggtttcagagttcagagagcttgatcg

SEQ ID NO: 58 - DNA, 30 bp, synthetic construct
  source 1..30: mol_type = other DNA
actctagatcaccgatatgatactcaatcc

SEQ ID NO: 59 - DNA, 34 bp, synthetic construct
  source 1..34: mol_type = other DNA
atagatctcaccgatatgatactcaatcccacca

SEQ ID NO: 60 - DNA, 24 bp, synthetic construct
  source 1..24: mol_type = other DNA
tctgagagatcttgatcgacctgc

SEQ ID NO: 61 - DNA, 34 bp, synthetic construct
  source 1..34: mol_type = other DNA
aatctagacttgatcgacctgcaggaagaatctg

SEQ ID NO: 62 - DNA, 34 bp, synthetic construct
  source 1..34: mol_type = other DNA
aatctagatgccttgttctctttagctcatcatc

SEQ ID NO: 63 - DNA, 33 bp, synthetic construct
  source 1..33: mol_type = other DNA
atagatctgccttgttctctttagctcatcatc

SEQ ID NO: 64 - DNA, 32 bp, synthetic construct; identical to SEQ ID NO: 39
  source 1..32: mol_type = other DNA

SEQ ID NO: 65 - DNA, 33 bp, synthetic construct; identical to SEQ ID NO: 40
  source 1..33: mol_type = other DNA

SEQ ID NO: 66 - DNA, 34 bp, synthetic construct
  source 1..34: mol_type = other DNA
tatctagaccttggtcgaccgatcagtaagagca

SEQ ID NO: 67 - DNA, 35 bp, synthetic construct
  source 1..35: mol_type = other DNA
atcccgggtcaattccactataatcaagtcccaag

SEQ ID NO: 68 - DNA, 20 bp, synthetic construct
  source 1..20: mol_type = other DNA
gcgtttgcaagaaacattgc

SEQ ID NO: 69 - DNA, 20 bp, synthetic construct
  source 1..20: mol_type = other DNA
agctataggtacgagacgac

SEQ ID NO: 70 - DNA, 20 bp, synthetic construct
  source 1..20: mol_type = other DNA
attcaagagtttctttgtaa

SEQ ID NO: 71 - DNA, 20 bp, synthetic construct
  source 1..20: mol_type = other DNA
tacttaacccaagcctatct

SEQ ID NO: 72 - DNA, 20 bp, synthetic construct
  source 1..20: mol_type = other DNA
agacttggacttgaggtcaa

SEQ ID NO: 73 - DNA, 24 bp, synthetic construct
  source 1..24: mol_type = other DNA
gattagacttggacttgaggtcaa

SEQ ID NO: 74 - DNA, 24 bp, synthetic construct
  source 1..24: mol_type = other DNA
aaacttgacctcaagtccaagtct

SEQ ID NO: 75 - DNA, 29 bp, synthetic construct
  source 1..29: mol_type = other DNA
aaaggtacccgtgacagccgaagtcaatg

SEQ ID NO: 76 - DNA, 29 bp, synthetic construct
  source 1..29: mol_type = other DNA
aaagaattctgtgctccacaagatgctcc

SEQ ID NO: 77 - DNA, 42 bp, synthetic construct
  source 1..42: mol_type = other DNA
tcaccccactcctacctttgcgaatattttgtatgttcagtg

SEQ ID NO: 78 - DNA, 42 bp, synthetic construct
  source 1..42: mol_type = other DNA
cactgaacatacaaaatattcgcaaaggtaggagtggggtga

SEQ ID NO: 79 - DNA, 45 bp, synthetic construct
  source 1..45: mol_type = other DNA
gggtttgattacttctattggaaaacctcaagtccaagtcttttc

SEQ ID NO: 80 - DNA, 45 bp, synthetic construct
  source 1..45: mol_type = other DNA
gaaaagacttggacttgaggttttccaatagaagtaatcaaaccc

SEQ ID NO: 81 - DNA, 41 bp, synthetic construct
  source 1..41: mol_type = other DNA
tcaccccactcctacctttgggcctttgtttatgctaagtg

SEQ ID NO: 82 - DNA, 41 bp, synthetic construct
  source 1..41: mol_type = other DNA
cacttagcataaacaaaggcccaaaggtaggagtggggtga

SEQ ID NO: 83 - DNA, 41 bp, synthetic construct
  source 1..41: mol_type = other DNA
atccttccttcgctctctccacctcaagtccaagtcttttc

SEQ ID NO: 84 - DNA, 41 bp, synthetic construct
  source 1..41: mol_type = other DNA
gaaaagacttggacttgaggtggagagagcgaaggaaggat

SEQ ID NO: 85 - DNA, 30 bp, synthetic construct
  source 1..30: mol_type = other DNA
aaagtcgactttcatggtccgtagactttt

SEQ ID NO: 86 - DNA, 33 bp, synthetic construct
  source 1..33: mol_type = other DNA
aaagaattcgatgacttaaactggaatcaattc

SEQ ID NO: 87 - DNA, 28 bp, synthetic construct
  source 1..28: mol_type = other DNA
cctagaattttacttaaatctctactac

SEQ ID NO: 88 - DNA, 29 bp, synthetic construct
  source 1..29: mol_type = other DNA
aaactcgagaactgcgtttgagtatctgc

SEQ ID NO: 89 - DNA, 31 bp, synthetic construct
  source 1..31: mol_type = other DNA
aaacctaggaatctacttcagattcttgttc

SEQ ID NO: 90 - DNA, 32 bp, synthetic construct
  source 1..32: mol_type = other DNA
aatactagtaagaattttaaaaatctcgtttc

SEQ ID NO: 91 - DNA, 33 bp, synthetic construct
  source 1..33: mol_type = other DNA
aaagaattcaacaatgagcccagaaagaagacc

SEQ ID NO: 92 - DNA, 33 bp, synthetic construct
  source 1..33: mol_type = other DNA
aaattcgaatcaaatctcagtaactggaagaac

SEQ ID NO: 93 - DNA, 29 bp, synthetic construct
  source 1..29: mol_type = other DNA
aaattcgaaggtttgagtttgagttcaca

SEQ ID NO: 94 - DNA, 31 bp, synthetic construct
  source 1..31: mol_type = other DNA
aaaaggccttaattattatataatcttgtat

SEQ ID NO: 95 - DNA, 33 bp, synthetic construct
  source 1..33: mol_type = other DNA
aaactcgagtatcatcttctctctctctttctg

SEQ ID NO: 96 - DNA, 32 bp, synthetic construct
  source 1..32: mol_type = other DNA
aaacctaggtacacattcatttctctcaatcg

SEQ ID NO: 97 - DNA, 29 bp, synthetic construct
  source 1..29: mol_type = other DNA
aaaaggcctggcctttgtttatgctaagt

SEQ ID NO: 98 - DNA, 28 bp, synthetic construct
  source 1..28: mol_type = other DNA
atactcgaggatgggttgcgcaaggttt

SEQ ID NO: 99 - DNA, 31 bp, synthetic construct
  source 1..31: mol_type = other DNA
aaatctagagattgttttccatttgtttctg

SEQ ID NO: 100 - DNA, 38 bp, synthetic construct
  source 1..38: mol_type = other DNA
aaagaattcgatcgctaacattaagttatcgataaagt

SEQ ID NO: 101 - DNA, 32 bp, synthetic construct
  source 1..32: mol_type = other DNA
aaagtcgactacaagccgcacaatacaagtcg

SEQ ID NO: 102 - DNA, 41 bp, synthetic construct
  source 1..41: mol_type = other DNA
aaatctagatccttaaatctgcaaagaaactaaaaaagttg

SEQ ID NO: 103 - DNA, 31 bp, synthetic construct
  source 1..31: mol_type = other DNA
aaagtcgactgagtcatcaaatgcttgggct

SEQ ID NO: 104 - DNA, 30 bp, synthetic construct
  source 1..30: mol_type = other DNA
ataactagtccaacaaaagtcaaagctgaa

SEQ ID NO: 105 - DNA, 42 bp, synthetic construct
  source 1..42: mol_type = other DNA
aaagtcgacctagttaattacacaaattttaattcatctagt

SEQ ID NO: 106 - DNA, 31 bp, synthetic construct
  source 1..31: mol_type = other DNA
aaaactagtcttttaccaaactactgtatgc

SEQ ID NO: 107 - DNA, 33 bp, synthetic construct
  source 1..33: mol_type = other DNA
aaactcgagatctttaattggttgttgctgtct

SEQ ID NO: 108 - DNA, 33 bp, synthetic construct
  source 1..33: mol_type = other DNA
aaagtcgactgagagatttagaaaatcatatcg

SEQ ID NO: 109 - DNA, 31 bp, synthetic construct
  source 1..31: mol_type = other DNA
aaagtcgacagaatttaacccttcttttctg

SEQ ID NO: 110 - DNA, 39 bp, synthetic construct
  source 1..39: mol_type = other DNA
aaactcgagtattgtgacaattcaaatttatctttaaat

SEQ ID NO: 111 - DNA, 31 bp, synthetic construct
  source 1..31: mol_type = other DNA
aaagtcgacacttgttgtcgctgaaaatcct

SEQ ID NO: 112 - DNA, 37 bp, synthetic construct
  source 1..37: mol_type = other DNA
aaactcgagaaacaatataatcaaattcaattactgg

SEQ ID NO: 113 - DNA, 30 bp, synthetic construct
  source 1..30: mol_type = other DNA
aaatctagaatggataacaacccaaacatc

SEQ ID NO: 114 - DNA, 32 bp, synthetic construct
  source 1..32: mol_type = other DNA
aaactcgagtcaagcggtcactggaatgaact

SEQ ID NO: 115 - DNA, 29 bp, synthetic construct
  source 1..29: mol_type = other DNA
aaatctagaatggaggagaacaaccagaa

SEQ ID NO: 116 - DNA, 37 bp, synthetic construct
  source 1..37: mol_type = other DNA
aaactcgagtcaaatgatctcaatcttatcaatgtag

SEQ ID NO: 117 - DNA, 29 bp, synthetic construct
  source 1..29: mol_type = other DNA
aaatctagaatgaacccaaacaacaggtc

SEQ ID NO: 118 - DNA, 30 bp, synthetic construct
  source 1..30: mol_type = other DNA
aaactcgagtcagttcactggaatgaactc

SEQ ID NO: 119 - DNA, 31 bp, synthetic construct
  source 1..31: mol_type = other DNA
aaacgatcgcgaatattttgtatgttcagtg

SEQ ID NO: 120 - DNA, 29 bp, synthetic construct
  source 1..29: mol_type = other DNA
aaatgatcatcaatacaaggaatccaagc

SEQ ID NO: 121 - DNA, 100 bp, Arabidopsis thaliana
  source 1..100: mol_type = unassigned DNA
caaggattccctatatgaccaacgtgtaaaatttaatatgaaactattatttttggtaactgctgtttttgataaatattgtaatcaattgaagaaattc

SEQ ID NO: 122 - DNA, 1417 bp, Arabidopsis thaliana
  source 1..1417: mol_type = unassigned DNA
atctataaataccttctcacaccttctccattcttcacatactcacacactcagctatcaagaagagaacaaactctctcaactctttcgttctcaagtatttgcttgcaagtgtctgatacgtacaatggattaccgatcatcaatggagtcttcggaaactctaaggaacaagtgtgccgcctgttacaggcaattcaacaaactggaacatttggtggagcacatgaagatctcttatcattcgggtcatgaacctacttgtggcgtttgcaagaaacattgcaggtcttttgagtccctccgagaacatctcatagggccattgccaaaacaagaatgcaagaacattttcagccttcgtggatgcagattttgcatgacgatactcgaaagcccgaattctcgtagaatccatcaagagagatgccaattctcgagcgtcaactctggattgacgactcgaatggcagctttaggcttaagagataaggccatgatcgactacacgtcatcacggtctccaagagtggttgcactctcttgcaagatggtaggaggaggaagtgacgggtcgttggatctatgcgcgagggtttgcataacggatgagagtgacaacgttatctttcacacgtatgtgaaaccttcgatggccgtgactagctataggtacgagacgacagggatacgcccggaaaatctaagggacgcaatgccattaaaacaagtacaaagaaagattcaagagtttctttgtaatggagaacccatgtggaagattcgtccaagaggtggaaaagcgaggattctcgtggggcatggcctcgatcacgatcttgaccgccttcaacttgaatatccttcttccatgataagggatactgcgaaatacccaccgttgatgaaaacaagcaagctgagcaactctctcaagtacttaacccaagcctatctcgggtatgatgttcattttgggatacaagacccttatgaagattgtgtagcgacgatgaggctttacacgagaatgagatatcagaaacacaagattgaagcttaccctttagccgccgatgcgcagaaccgtagcaaccaggtggcttggaggcagagtgaggccgagaggatgtctcctgatgaaatgctctcaatctctcgttccgactattactgctggtgcttagactcactagcttaatttctaaacttatggggttatttaagtggtctcttaaaattagtaattcttcaaacttttccagagatttttaatttagtagtgtaatgtcgaataacattggttatgattttgtagtagtatctaaattttcgagtgtgtgttgtgtgagatgcctagattgttattgaactttgtaataatgcattaatctcaattattgattaattgactgct

SEQ ID NO: 123 - DNA, 1074 bp, Arabidopsis thaliana
  source 1..1074: mol_type = unassigned DNA
atggattaccgatcatcaatggagtcttcggaaactctaaggaacaagtgtgccgcctgttacaggcaattcaacaaactggaacatttggtggagcacatgaagatctcttatcattcgggtcatgaacctacttgtggcgtttgcaagaaacattgcaggtcttttgagtccctccgagaacatctcatagggccattgccaaaacaagaatgcaagaacattttcagccttcgtggatgcagattttgcatgacgatactcgaaagcccgaattctcgtagaatccatcaagagagatgccaattctcgagcgtcaactctggattgacgactcgaatggcagctttaggcttaagagataaggccatgatcgactacacgtcatcacggtctccaagagtggttgcactctcttgcaagatggtaggaggaggaagtgacgggtcgttggatctatgcgcgagggtttgcataacggatgagagtgacaacgttatctttcacacgtatgtgaaaccttcgatggccgtgactagctataggtacgagacgacagggatacgcccggaaaatctaagggacgcaatgccattaaaacaagtacaaagaaagattcaagagtttctttgtaatggagaacccatgtggaagattcgtccaagaggtggaaaagcgaggattctcgtggggcatggcctcgatcacgatcttgaccgccttcaacttgaatatccttcttccatgataagggatactgcgaaatacccaccgttgatgaaaacaagcaagctgagcaactctctcaagtacttaacccaagcctatctcgggtatgatgttcattttgggatacaagacccttatgaagattgtgtagcgacgatgaggctttacacgagaatgagatatcagaaacacaagattgaagcttaccctttagccgccgatgcgcagaaccgtagcaaccaggtggcttggaggcagagtgaggccgagaggatgtctcctgatgaaatgctctcaatctctcgttccgactattactgctggtgcttagactcactagcttaa

SEQ ID NO: 124 - protein, 357 aa, Arabidopsis thaliana
MDYRSSMESSETLRNKCAACYRQFNKLEHLVEHMKISYHSGHEPTCGVCKKHCRSFESLREHLIGPLPKQECKNIFSLRGCRFCMTILESPNSRRIHQERCQFSSVNSGLTTRMAALGLRDKAMIDYTSSRSPRVVALSCKMVGGGSDGSLDLCARVCITDESDNVIFHTYVKPSMAVTSYRYETTGIRPENLRDAMPLKQVQRKIQEFLCNGEPMWKIRPRGGKARILVGHGLDHDLDRLQLEYPSSMIRDTAKYPPLMKTSKLSNSLKYLTQAYLGYDVHFGIQDPYEDCVATMRLYTRMRYQKHKIEAYPLAADAQNRSNQVAWRQSEAERMSPDEMLSISRSDYYCWCLDSLA

SEQ ID NO: 125 - protein, 35 aa, Arabidopsis thaliana
HQERCQFSSVNSGLTTRMAALGLRDKAMIDYTSSR

SEQ ID NO: 126 - DNA, 127 bp, Arabidopsis thaliana
  source 1..127: mol_type = other DNA
atctataaataccttctcacaccttctccattcttcacatactcacacactcagctatcaagaagagaacaaactctctcaactctttcgttctcaagtatttgcttgcaagtgtctgatacgtaca

SEQ ID NO: 127 - DNA, 216 bp, Arabidopsis thaliana
  source 1..216: mol_type = other DNA
tttctaaacttatggggttatttaagtggtctcttaaaattagtaattcttcaaacttttccagagatttttaatttagtagtgtaatgtcgaataacattggttatgattttgtagtagtatctaaattttcgagtgtgtgttgtgtgagatgcctagattgttattgaactttgtaataatgcattaatctcaattattgattaattgactgct

SEQ ID NO: 128 - DNA, 708 bp, Arabidopsis thaliana
  source 1..708: mol_type = other DNA
aactacttgatgtggtttacgccattgttggtattcttgtgtatataaaatgatttttttttcttagtacatgtacatacaaacttcattttttcaacaaaaaaacaaattttagtgtattgaaggctttttaaaaattcgaaaatgaagtgaatgatgtaagaacattttctaatattttagagattattcataaaccttttattggtatttttgaaagttatataaacaatcgtaattgcttgatggtttgtatttttgatcctttgtatttttatgtgagcctttgtatatttgtttttcttccctacacctacttagtgttggctagctagttatctgtgtgagattttcttgtttataaacttgatcgacatcacattttcacacacacacgtgcatacaataatagcatcttcgttatcgtccaaaacaaatgacaactaaaaattatgattccttttaccatgaaaagcgaccccatcgcattaaggcatctacttcaatttctgttcgtctctaacggtcatatatgagaatggtcagctttgcttttcttcatcctgcttttatgaatattcatctataaataccttctcacaccttctccattcttcacatactcacacactcagctatcaagaagagaacaaactctctcaactctttcgttctcaagtatttgcttgcaagtgtctgatacgtaca

SEQ ID NO: 129 - DNA, 2065 bp, Arabidopsis thaliana
  source 1..2065: mol_type = genomic DNA
tgcttgcaagtgtctgatacgtacaatggattaccgatcatcaatggagtcttcggaaactctaaggtaactattttcatggcctacgcctataataccaaaccataattccatcaaaaactccaagagaagactaatggagctagtggcatgcaatatcatatccaaattcttgattcaagtgatgaaaaaccaaaactaagttttattgatttgaatgtatatacatgtcaatgtacaggaacaagtgtgccgcctgttacaggcaattcaacaaactggaacatttggtggagcacatgaagatctcttatcattcgggtcatgaacctacttgtggcgtttgcaagaaacattgcaggtcttttgagtccctccgagaacatctcataggtaaataatagcctctataaacttttcatatatatagatatatagcatttcatatacacactttgtatatgaaagcttttataaattttgttatctctatatagggccattgccaaaacaagaatgcaagaacattttcagccttcgtggatgcagattttgcatgacgatactcgaaagcccgaattctcgtagaatccatcaagagagatgccaattctcgagcgtcaactctgtaatcctctttttcatatttatataattaaacttttaacctatatgaatcgaacgcaagaatatatacttattcaaatcatatgattttctcattttcagggattgacgactcgaatggcagctttaggcttaagagataaggccatgatcgactacacgtcatcacggtctccaagagtggttgcactctcttgcaagatggtaggaggaggaagtgacgggtcgttggatctatgcgcgagggtttgcataacggatgagagtgacaacgttatctttcacacgtatgtgaaaccttcgatggccgtgactagctataggtacgagacgacagggatacgcccggaaaatctaagggacgcaatgccattaaaacaagtacaaagaaagattcaagagtttctttgtaatggagaacccatgtggaagattcgtccaagaggtggaaaagcgaggattctcgtggggcatggcctcgatcacgatcttgaccgccttcaacttgaatatccttcttccatgataaggttgacatttatatttaagaaaataaataaagaaaatacatataacaagattctttagtgttacttctctttcgatataacatatgattttatgtgagtttatatgttaatggtgaagtttaatgtttgtatgtagggatactgcgaaatacccaccgttgatgaaaacaagcaagctgagcaactctctcaagtacttaacccaagcctatctcgggtaataatattattttttggtattataatatattgaatcaaataaactaatttggaaattgtgtatatatgcatgcactcgtatgttgatacaatatatgtgtataaatgattactttttgatgatgagggtattgatgcttgtatgggtttaaagttataaggaagagtttcaaaacgtgaaaagattcactgtttaataatacattaatctctatatatatctacacacatatacatatatggattgtatatgactagcaccaaaatcgttaagacatttttattttacatgagatgcttattatattcaagattatatgttaataaatgatgtgtttatataggtatgatgttcattttgggatacaagacccttatgaagattgtgtagcgacgatgaggctttacacgagaatgagatatcagaaacacaagattgaagcttaccctttagccgccgatgcgcagaaccgtagcaaccaggtggcttggaggcagagtgaggccgagaggatgtctcctgatgaaatgctctcaatctctcgttccgactattactgctggtgcttagactcactagcttaatttctaaacttatggggttatttaagtggtctcttaaaattagtaattcttcaaacttttccagagatttttaatttagtagtgtaatgtcgaataacattggt

SEQ ID NO: 130 - protein, 357 aa, Arabidopsis thaliana
MDYRLLMDSSETLRNKCGGCYRQFNKKEHLVEHMRISYHSVHEPTCGICNKHCRSFDSLREHLIGPLPKQECKNIFSIRGCRFCLTILESPNARRIHQERCQLSNVTSGLMIRMAALGLRNNSTIDYTSSRSPRVVALSCKMVGGGSDGSLDLCARVCITDESENVVFHTYVKPTIPVTNYRYEMTGIRPENLRDAMRLKHAQRKVQEFLCNGEPMWKIRPRNGKARILVGHGLDNHLDSLQLEYSSSMIRDTAEYPPLMKSSKLSNSLKYLTQAYLGYDIHVGIQDPYEDCVATMRLYTRMRYQKHRAEAYPLASDTQNHNNFAAWRQNELERMSPEELLDLSRSDYYCWCLDSVA

SEQ ID NO: 131 - DNA, 1349 bp, Arabidopsis thaliana
  source 1..1349: mol_type = other DNA
caaaaaaaaacaaagaagattaaacctgtttaatcaaattctcctgattaacgcaacatatttgaggttgctgttatttactatggactacagattgttaatggattcctcagaaaccctaaggaacaagtgtggagggtgttataggcaattcaacaagaaggagcacttggtggaacacatgaggatctcttatcattcggttcatgaacctacttgtggtatttgcaacaaacattgccgatcttttgactccctccgtgaacatctcattgggccattgccgaaacaagaatgtaagaacattttcagcattcgcggctgcagattctgtcttacgatcctcgaaagccccaacgctcgtagaatccatcaagagagatgccagctctcaaacgtcacttctggattaatgattcgtatggcggccttaggcctaagaaacaactcaacaattgactacacttcttcgaggtcacctcgagtggtggcactctcatgcaagatggttggaggaggcagtgacggatcgcttgacctatgcgcaagagtttgcattacggatgagagcgaaaatgttgtgttccacacgtatgtgaagccaacgatacccgtaacgaattataggtatgagatgacagggattcgacctgaaaatctaagggacgcaatgcgattaaagcacgcacagagaaaggttcaagagtttctttgtaatggagaaccaatgtggaagattcgtccaagaaatgggaaagcaaggattctcgttggacatggacttgataaccatcttgactctcttcaacttgaatattcttcctctatgataagagatactgcggaataccctccattgatgaaatcaagcaagctaagcaactctctcaagtacttaacccaagcctatctcggttatgatattcatgtgggaatacaagatccttacgaggactgtgtcgcgacaatgaggctatacacgagaatgcgatatcagaaacacagggccgaggcctatccgctggcctcggacacgcagaaccacaataactttgcggcgtggaggcagaatgaactagagaggatgtctccagaggagttgctcgacctttcacgttcagactattactgctggtgcttggactcggttgcttgaaaaagaaagttatactgatggtgcttgatcatctccgaaaaataagatgcatgcgaggatatatttagtaaagtataattgaaaatcgaataaacattatctttattagtgattgtggtggtaatttggcattcttgtatcatctatgttacatgtaattgtaactcatgcatggttatgtacttcatacgcg

SEQ ID NO: 132 - DNA, 3045 bp, Arabidopsis thaliana
  source 1..3045: mol_type = genomic DNA
acatatttgaggttgctgttatttactatggactacagattgttaatggattcctcagaaaccctaaggtatttatctatattagagtaaaatcttgtgtttctttgatataattgtaccaccattggtgtacgcattttttctattaccaccgacatctaatgatatcgaatatgtatgcataaaactctttcaaacatgaacaatacgtaatcttaactaggtaaatttgtaatttactaatctagtgcgaaaccgtatctaaaatatatataaagtataaattattattaaaaacatatggatacatgcaggaacaagtgtggagggtgttataggcaattcaacaagaaggagcacttggtggaacacatgaggatctcttatcattcggttcatgaacctacttgtggtatttgcaacaaacattgccgatcttttgactccctccgtgaacatctcattggtatatatatctctaacctagttcataacttgtctttaatatttcacttttcctcatttcattttgggtcatatcgtacatagggccattgccgaaacaagaatgtaagaacattttcagcattcgcggctgcagattctgtcttacgatcctcgaaagccccaacgctcgtagaatccatcaagagagatgccagctctcaaacgtcacttctgtatatatcatcttcacatatatgaaataaccatcgtatacatgtcataattatttcttcttcaatgtatatttaatcttgcatttaaacattactaaaatatatatattaaaatttaaaatactaaaaacgaccttatttaaaaaatcattagtattaaacgtaaatgcatatagataatatataatctaatatttttactgatattttagggattaatgattcgtatggcggccttaggcctaagaaacaactcaacaattgactacacttcttcgaggtcacctcgagtggtggcactctcatgcaagatggttggaggaggcagtgacggatcgcttgacctatgcgcaagagtttgcattacggatgagagcgaaaatgttgtgttccacacgtatgtgaagccaacgatacccgtaacgaattataggtatgagatgacagggattcgacctgaaaatctaagggacgcaatgcgattaaagcacgcacagagaaaggttcaagagtttctttgtaatggagaaccaatgtggaagattcgtccaagaaatgggaaagcaaggattctcgttggacatggacttgataaccatcttgactctcttcaacttgaatattcttcctctatgataaggtaaataaatacttttactagaaacactaatttcttaagttatataatgtttggtttttagtctataatctatggtcataaataaaagtgaaaaaaaaaatatgtgataagaaagatattgaccgttttaactctttatcaaaagaaataaaagatactgaccattttcaactttagtatcattaatcctttcgtgtaagaaccctatcgatatactattaaatacactatggatattgaccgtttagtttttaaactaaatacactattttttgctgaactgaatttcatatagatgataaaaagaaattgtaaaccaagacgatttttttttttgtttttgttttcctaaccgctgatttatatacaattcatatgtatatagtgggaattttacaattatatcaattatttttgttgttgttaatagagatactgcggaataccctccattgatgaaatcaagcaagctaagcaactctctcaagtacttaacccaagcctatctcgggtaatgtttttttttttttacatttccatagtatacaaactgacattgtcatattggatatcataaattattgaaaatctattgatcagactttaaaatgttccatgataatttaaaaaatattcaacttgaaaacaaaatagttcatctactaaaccatgcatatacttttcaaaaaaagaaaacaaatcttgtgtgatattcggacgcaacaactataagctagtaaagaaggtatccgatttttgacatgattaaaagttattaatcaccgtataaagtacgacatgcgtattagcttaaaaagtttcttaagaattcgaataaaatcaaccgatgataatcctaagaatatctcgtccatatcaaagttcgatttgtctgtctctactctctacctcatattttatattattgtgattcataaccaaaagttcgtatgtcttattttgttcccctcctacctataaggttttccaaaaatactttcatacacaaattgcaattttaatttttctaagaaatacaaatctttaactgggattaatatgaaaaatagtcgaatctttcaaactaaagaaatatactttttagtttacgttagtgtcaatgatttcgtttttagagctaggttgagtttaacaggtttgttttagattagagtttagaattcatcagttatattttaaaatagtactttaactaaaacaatctagaataattgcggttcttgtagtaatttactaattttcaacttccttggctttgtaaagttatgatattcatgtgggaatacaagatccttacgaggactgtgtcgcgacaatgaggctatacacgagaatgcgatatcagaaacacagggccgaggcctatccgctggcctcggacacgcagaaccacaataactttgcggcgtggaggcagaatgaactagagaggatgtctccagaggagttgctcgacctttcacgttcagactattactgctggtgcttggactcggttgcttgaaaaagaaagttatactgatggtgcttgatcatctccgaaaaataagatgcatgcgaggatatatttagtaaagtataattgaaaatcgaataaacattatctttattagtgattgtggtggtaatttggcattcttgtatcatctatgttacatgtaattgtaactcatgcatggttatgtacttcatacgcgtctgtgt

SEQ ID NO: 133 - protein, 357 aa, Brassica napus
MDYRSSMESSETLRNKCAACYRQFNKMEHLVEHMKISYHSGHEPTCGVCKKHCRSFESLREHLIGPLPKQECKNIFSLRGCRFCMMILESPNARRIHQERCQFSSVNAGLTTRMAALGLRDKAMIDYTSSRSPKMVALSCKMVGGGSDGSLDLCARVCITDENDNVVFHTYVKPSMVVTNYRYETTGIRPENLRDAMPLKHAQRKIQEFLCNGEPMWKIRPRGGKGRILVGHGLDHDLDRLQLEYPSSMMRDTAKYPPLMKTSKLSNSLKYLTQAYLGYDIHVGIQDPYEDCVATMRLYTRMRYQKHKIEAYPLPADVQNRSNQVAWRQSEVERMSPNEMLSISRSDYYCWCLDSLA

SEQ ID NO: 134 - DNA, 1453 bp, Brassica napus
  source 1..1453: mol_type = other DNA
gcataatacattaataaaaaaactcatcaaaagaattgtttaacttctccccactcttaaattgttgagttctttgtttgcattttcatacgtaccatggattacagatcatctatggagtcatcggaaaccctaaggaacaagtgcgcagcttgttataggcaattcaacaaaatggaacatttggtggaacacatgaagatctcttatcactccggtcatgagcctacttgtggggtttgcaagaaacattgccgatcttttgagtcactccgcgaacatctcataggaccattgccaaaacaagaatgcaagaacatttttagccttcgcggatgcagattctgcatgatgatcctcgaaagccctaacgctcgtaggattcatcaagagagatgccaattttcgagcgtcaatgctggattgacgactcgtatggcagcgttaggccttagagataaagccatgatcgactacacgtcatcacggtctccaaaaatggttgcactctcttgcaagatggtaggaggaggaagcgacgggtcgttggatctatgcgcaagggtttgcataacggatgagaacgacaacgttgtgttccacacgtacgtgaaaccgtcaatggtcgtgacgaactataggtacgagacgaccggtatacgtccagagaatctgagggacgcaatgccgttgaaacatgcacaaagaaagattcaagaatttctttgtaatggagaacccatgtggaagattcgtccaagaggtgggaaagggaggattctcgtgggacatgggctggatcacgatcttgaccgccttcaacttgaatatccttcttccatgatgagggatactgcaaaatatcctccgttgatgaaaacaagcaagctgagcaattctctcaagtacttaacccaagcctatctcgggtatgatattcatgttgggatacaagacccatacgaagattgtgtagcgacgatgaggctttacacgagaatgagatatcagaaacataagattgaagcatatcctttaccagccgacgtgcagaaccgtagcaatcaagtggcttggaggcagagcgaggtcgaaaggatgtctcctaatgaaatgctctccatctctcgctccgactactattgctggtgcttggactccctcgcttaattccaaaaactatggggttaaaatttgagaatctctcataattacttcataaactttttcgagatttttaatttagtagcgtaaagtcgaataagcattacttctgatttcaaatagtatctaaattaattttatagtatgtgtcgtgtgagatgcgaatgttgttcctgtacttctaataacgcatattgctcttaattattaataattattgttttttaaaaattaattagtaatcacttgttagcttttgtgtataaatatatctatatttgtcttagaa

SEQ ID NO: 135 - DNA, 2507 bp, Brassica napus
  source 1..2507: mol_type = genomic DNA
atggattacagatcatctatggagtcatcggaaaccctaaggtaaccattttcatcctaagcgtgtgttatatcaagcgttttaattgaaaaaaaaatcccaaagaaaaactcaatggagtggcatgcaatatcatacccaaattctgtggtcaactgatgaaaaattaagactaaaattatttttttttctaaaatatatttgtatatatatgttaaaaatatattgatgtatatatgtacacgtacaggaacaagtgcgcagcttgttataggcaattcaacaaaatggaacatttggtggaacacatgaagatctcttatcactccggtcatgagcctacttgtggggtttgcaagaaacattgccgatcttttgagtcactccgcgaacatctcataggtaaataagaagctatataaaaagagtgacatatagttttatatatacgctatgcatttgtatgttaatttttaattgtgtaatgtcaataggaccattgccaaaacaagaatgcaagaacatttttagccttcgcggatgcagattctgcatgatgatcctcgaaagccctaacgctcgtaggattcatcaagagagatgccaattttcgagcgtcaatgctgtacgtaatcgtattattgcccttatctcaatactcctcttctcatatttgcgtaactaaacttgtaaattgaccacatgaaaaaaataattcttatataaataatgtaatatcatatgatttgtctttttcagggattgacgactcgtatggcagcgttaggccttagagataaagccatgatcgactacacgtcatcacggtctccaaaaatggttgcactctcttgcaagatggtaggaggaggaagcgacgggtcgttggatctatgcgcaagggtttgcataacggatgagaacgacaacgttgtgttccacacgtacgtgaaaccgtcaatggtcgtgacgaactataggtacgagacgaccggtatacgtccagagaatctgagggacgcaatgccgttgaaacatgcacaaagaaagattcaagaatttctttgtaatggagaacccatgtggaagattcgtccaagaggtgggaaagggaggattctcgtgggacatgggctggatcacgatcttgaccgccttcaacttgaatatccttcttccatgatgaggtgacatttctataaagaagaaaagtaaagaggacacatatatataactagattccttatagtgttacttggtttctcgcaacacaacccagactttacgtgagttgttttacgattaacgtgaatttctaatatcatttttatatattggtgtgtgtagggatactgcaaaatatcctccgttgatgaaaacaagcaagctgagcaattctctcaagtacttaacccaagcctatctcgggtaatatatctacttttgtgtttgtaatacaactttcgaatataacattaatttggaaaatgaatatagatatttgcatactttacgtgtattgatacataagtgtatcatgtactatccattaatttttttggtgatgtatgggtattgatgctttgtatgggcttaaagctaaaaggaagggattcaaaacgtgaaaagattcatatgttatataatataaccattttctaacaaaaacaaaaagaatttacatagttggagatttttaatttacatgagatgcttactagcgtaactttttatctccaagttgactaaatcaacctatttatttcattttatttcctatcaattacaaatagttcaactagtataccattgttttgtatgtaaaattatagggatgagtgtgtatgcctaatatcatatgttccatataatctgtgttggcaccgtagaagtaatctaaaacacttgagatcaattaattatacccattatctaatgtacaacaatatatatatattaaggatggtattgatgtgcttataggtatgatattcatgttgggatacaagacccatacgaagattgtgtagcgacgatgaggctttacacgagaatgagatatcagaaacataagattgaagcatatcctttaccagccgacgtgcagaaccgtagcaatcaagtggcttggaggcagagcgaggtcgaaaggatgtctcctaatgaaatgctctccatctctcgctccgactactattgctggtgcttggactccctcgcttaattccaaaaactatggggttaaaatttgagaatctctcataattacttcataaactttttcgagatttttaatttagtagcgtaaagtcgaataagcattacttctgatttcaaatagtatctaaattaattttatagtatgtgtcgtgtgagatgcgaatgttgttcctgtacttctaataacgcatattgctcttaattattaataattattgttttttaaaaattaattagtaatcacttgttagcttttgtgtataaatatatctatatttgtcttagaa

SEQ ID NO: 136 - protein, 357 aa, Brassica napus
MDCRSSMESSETLRNKCAACYKQFNKLEHLVEHMKISYHSGHEPMCGVCKKHCRSFESLREHLIGPLPKQECKNIFSFRGCRFCLMILETPNARRIHQERCQFSSVNAGLTTRMAALGVRDKAMIDYTSSRSPKVVALSCKMVGGGSDGSLDLCARVCITDESDNVVFHTYVKPSMPVTNYRYEKTGIRPENLRDAMPLKHAQRKIQEFLCNGEPMWKIRPRGGKGRILVGHGLDHDLDRLQLEYPSSMIRDTAKYPPLMKTSKLSNSLKYLTQAYLGYDVHVGIQDPYEDCVATMRLYTRMRYQKHKIEAYPLAADAHNRSNQVAWRQNEFERMSPDEMLSISRSDYCCWCLDSLA

SEQ ID NO: 137 - DNA, 1376 bp, Brassica napus
  source 1..1376: mol_type = other DNA
acacatctataatacaaaaaggatcatcaaaacagttgtttaaactctctcatctctcaagttgctacgtttttgtttgtattttccgatacgtaccatggattgcagatcatctatggagtcatcggaaaccctaaggaacaagtgcgcagcttgttataaacaattcaacaaattagaacatttagtggagcacatgaagatctcgtatcactccggtcatgagcctatgtgtggcgtttgcaagaaacattgccgatcttttgagtccctccgggaacatctcatagggccattgccaaaacaagaatgcaagaacattttcagctttcgcggatgcagattctgcttgatgatcctcgaaaccccgaacgctcgtaggatccatcaagagagatgccaattttcgagcgtcaatgctggattgacgactcgtatggcggccttaggcgtaagagataaggccatgatcgactacacgtcgtctagatccccaaaagtggttgcactctcttgcaagatggtaggagggggaagcgacgggtcgctggatctatgcgcaagggtttgcataacggatgagagcgacaacgttgttttccatacgtacgtgaaaccgtcaatgcccgtgacgaactataggtatgagaagaccggcatacgtccggagaatctaagggacgcaatgccgttgaaacatgcacaaagaaagattcaagagtttctttgtaatggagaacccatgtggaagattcgtccaagaggtgggaaagggaggattctcgtgggacatggcctcgatcacgatcttgaccgccttcaacttgaatatccttcttccatgataagggatactgcgaaataccctccgttgatgaaaacaagcaagctgagcaattccctcaagtacttgacccaagcctatctcgggtatgatgttcatgttgggatacaagacccatacgaagattgtgtagcgacgatgaggctttacacgagaatgagatatcagaaacacaagattgaagcttatcctttagctgccgacgcgcacaaccgtagcaatcaagtggcttggaggcagaacgagttcgagaggatgtctcctgatgaaatgctttccatctctcgatccgactactgttgctggtgcttggactccctcgcctgatttctaaaactatggggttaagttgaggaatttcacataataacttcgtaaactttttcaagatattaaatttagtagcgtaatgtcgaataagaatcagttgttatttttaatatatactagtatctaaattttatagtatgtgtcgtgtgagacgcataaattgttactgtacttgtaataatgcattgcttttcaatgatta

SEQ ID NO: 138 - DNA, 2204 bp, Brassica napus
  source 1..2204: mol_type = genomic DNA
atggattgcagatcatctatggagtcatcggaaaccctaaggtaacctatcttccatcgtacgtgtattatattatatcaagcgtttatatgaaaatatcgaaaagaactcatggaggatgtcatccagtatcacacccaaattctataatcaattgatgaaaaataagaaataaagtttttcttaatttatagtttttatacatatgtacacgcacgtgcaggaacaagtgcgcagcttgttataaacaattcaacaaattggaacatttagtggagcacatgaagatctcgtatcactccggtcatgagcctatgtgtggcgtttgcaagaaacattgccgatcttttgagtccctccgggaacatctcataggtaaatgataagctatatatattaagagaaatatatcgttttatatattcacgacgcatatgtgtatttattttttattgtgctatattattagggccattgccaaaacaagaatgcaagaacattttcagctttcgcggatgcagattctgcttgatgatcctcgaaaccccgaacgctcgtaggatccatcaagagagatgccaattttcgagcgtcaatgctgtaatcttttcttctaatatttgcgcaaattaaaattgttaataatcaaccgcataacaatatattcttacatattttctatgtatcagggattgacgactcgtatggcggccttaggcgtaagagataaggccatgatcgactacacgtcgtctagatccccaaaagtggttgcactctcttgcaagatggtaggagggggaagcgacgggtcgctggatctatgcgcaagggtttgcataacggatgagagcgacaacgttgttttccatacgtacgtgaaaccgtcaatgcccgtgacgaactataggtatgagaagaccggcatacgtccggagaatctaagggacgcaatgcccttgaaacatgcacaaagaaagattcaagagtttctttgtaatggagaacccatgtggaagattcgtccaagaggtgggaaagggaggattctcgtgggacatggcctcgatcacgatcttgaccgccttcaacttgaatatccttcttccatgataaggtggcatttctataaagaaaaaaaaaatataaagaggatatatacgtatataactagattcctttagtgttacttgaaatctttcaatatagcccatgattttatgtgtgttttttatatgacgggattttgtatcattttattgctgtatgtagggatactgcgaaataccctccgttgatgaaaacaagcaagctgagcaattccctcaagtacttgacccaagcctatctcgggtaatatatctaattttgtttttgtaataatattttcgaacctaacacattaatttggaaaatgattatagatgcatgcatacattacctatattgatacacatatatatcataataggtgggtattgatgtttgtatgggcttaaatgggagggcttcaaaacgtaagatttacatgttttcaaatatattcatttcaaaatttacacataaacatatatactttgtgtgattagaactatcattgaagtaaataaaatgaaatcattataacaaaaaggaatttacatggttagaaattttactttaccctagatacttaatacttattagcgtagattttccttacatcaacctgtttatttcattttcttttctttttaacgcaaatatatagttccaatagtatttacccttgttttctgtatgtaaaattttagggatgagtagtgtgtatgcctcataccatatgttccatatataatctatgttcgtgtctaccaaccgtataagtaatctaaaacacttgagatcaattatatacacattaattgtctaatgttcaagaatcaagaccatatattaatgacgattattgatgtgcttataggtatgatgttcatgttgggatacaagacccatacgaagattgtgtagcgacgatgaggctttacacgagaatgagatatcagaaacacaagattgaagcttatcctttagctgccgacgcgcacaaccgtagcaatcaagtggcttggaggcagaacgagttcgagaggatgtctcctgatgaaatgctttccatctctcgatccgactactgttgctggtgcttggactccctcgcctga

SEQ ID NO: 139 - protein, 356 aa, Brassica napus
MDCRSMESSETLRNKCAACYKQFNKMEHLVEHMKISYHSGHEPTCGVCKKHCRSFESLREHLIGPLPKQECKNIFSILGCRFCLMILETPNARRIHQERCQFSSVNAGLTTRMAALGIRDKDMIDYTSSRSPKVVALSCKMVGGGSDGSLDLCARVCITDEGDNVVFHTYVKPSMAVTNYRYEKTGIRPENLRDAMPLKHAQRKIQEFLCNGEPMWKIRPRGGKGRILVGHGLDHDLDRLQLEYPSSMIRDTAKYPPLMKTSKLSNSLKYLTQAYLGYDVHVGIQDPYEDCVATMRLYTRMRYQKHKIEAYPLAADAHNRSNQVVWRQNEFERMSPDEMLSISRSDYYCWCLDSLA

SEQ ID NO: 140 - DNA, 1331 bp, Brassica napus
  source 1..1331: mol_type = other DNA
ataatacaaaaaaaatcatcaaaacagttgcttaaactctctcatatcttaagttgctacgtttttgtttgtattttccgatacgtaccatggattgcagatctatggagtcatcggaaaccctaaggaacaaatgcgcagcttgttataagcaattcaacaaaatggaacatttagtggagcacatgaagatctcgtatcactccggtcatgagcctacctgcggcgtttgcaagaaacattgccgatcttttgagtccctccgagaacacctcatagggccattgccaaaacaagaatgcaagaacattttcagcattctcggatgcagattctgcttgatgatcctcgaaaccccgaacgctcgtaggatccatcaagagagatgccaattttcgagcgtcaatgcgggattgacgactcgtatggcggccttaggcataagagataaggacatgatcgactacacgtcgtctaggtccccaaaagtggttgcactttcttgcaagatggtaggagggggaagcgacgggtcgctggatctatgtgcaagggtttgcataacggatgagggcgacaatgttgtgttccatacgtacgtgaaaccgtcaatggccgtgacgaactataggtatgaaaagaccggcatacgtccggagaatctgagggacgcaatgccgttgaaacatgcacaaagaaagattcaagagtttctttgtaatggagaacccatgtggaagattcgtccaagaggtgggaaagggaggattctcgtgggacatggcctcgatcacgatcttgaccgccttcaacttgaatatccttcttccatgataagggatactgcgaaataccctcccttgatgaaaacaagcaagctgagcaattccctcaagtacttgacccaagcctatctcgggtatgatgttcatgttgggatacaagacccatacgaagattgtgtagcgacgatgaggctttacacgagaatgagatatcagaaacacaagattgaagcttatcctttagctgccgacgcgcacaaccgtagcaatcaagtggtttggaggcagaacgagttcgagaggatgtctcctgatgaaatgctttccatctctcgctccgactactattgctggtgcttggactccctcgcttgatttctgaaactctggggttaagttgaggaatttcacataataacttcgtaaactttttgaagataataaatttagtagcgtaatgtcgaataagaatcagttgttatttttaatatgtactagtatataaattttatagtatgtgtcgtgtgagacgcatataaattgtta

SEQ ID NO: 141 - DNA, 3287 bp, Brassica napus
  source 1..3287: mol_type = genomic DNA
atggattgcagatctatggagtcatcggaaaccctaaggtaacctatcctccatcgtacgtgtattagattatatcaagcgtttatatgaaaatatcgaaaagaactcagggagggtgtcatccactatcacatccaaattctataatcaattgatgaaaaactagaaataatttgttttccttaaattatagttttatacatatgtacacgtacgtgcaggaacaaatgcgcagcttgttataagcaattcaacaaaatggaacatttagtggagcacatgaagatctcgtatcactccggtcatgagcctacctgcggcgtttgcaagaaacattgccgatcttttgagtccctccgagaacacctcataggtaaatgataacctatatatattaagagaaatgtatcgttttatacattcacgacgcatatgtgtatttatttttaattgtgttatatacatagggccattgccaaaacaagaatgcaagaacattttcagcattctcggatgcagattctgcttgatgatcctcgaaaccccgaacgctcgtaggatccatcaagagagatgccaattttcgagcgtcaatgcggtaatcttttcttctcatatttgcataattaaaattgttaataatcaaccgcacaaaatatatttattcttacatatatgatatgattttctctgtttcagggattgacgactcgtatggcggccttaggcataagagataaggacatgatcgactacacgtcgtctaggtccccaaaagtggttgcactttcttgcaagatggtaggagggggaagcgacgggtcgctggatctatgtgcaagggtttgcataacggatgagggcgacaatgttgtgttccatacgtacgtgaaaccgtcaatggccgtgacgaactataggtatgaaaagaccggcatacgtccggagaatctaagggacgcaatgcccttgaaacatgcacaaagaaagattcaagagtttctttgtaatggagaacccatgtggaagattcgtccaagaggtgggaaagggaggattctcgtgggacatggcctcgatcacgatcttgaccgccttcaacttgaatatccttcttccatgataaggtggcatttctataaagaaaaaatataaagaggatatatatataatagaaaaagactagcatagcaccaaaccaagtttttcctcaaactagcactcaaggatcaaagtcacaaaaataggtttcattaaaaagataaatatactcttagggtttagagttaggggtggagtttttgaattagagtttaaaattttataaaataaaaaataaatactaaaaaattaaaaataaaaattaaaaaaacagtttcaaaaagtatttttgaattataaaaagaaaatttaaaaaaaaataaaaaaaatttcgaaaaaaaattataaaaaatgtcgaatctgaaaacatataatctgaaactataaaaaaaaatttcatttttttttatttttattttatttgtttttatttattttgtttgttaatttaattttaaaccaaaagtattagacatattttatcatttaatgaatgtcatttttgtgactttttccttctaatgttatttttgagataaaaactcaaaaggtgctattattgacaattgtcactagattcctttagtgttacttgaaatctttcaatatagccaatgattttatgtgtgttttttatatgacgggattttgtatgatcttattgctgtatgtagggatactgcgaaataccctcccttgatgaaaacaagcaagctgagcaattccctcaagtacttgacccaagcctatctcgggtaatatatctaattttgtttttgtaataatattttcaaaccgggtgttgatgctttgtatgggcttaaagttataagggagggcttcaaaacgtaagattcacatgttttctaatatattcatttcaaaatttacacataaacatatatatatagtttgtgtgactagaaatatcattgaagtaaataaaatgaattcattataataaaaacaaatttacatggttagaaattttactttaccctagatacttaatacttattagcgttgattttccttacatcaacctggttatttcattttcttttctttttaacgcaaatatatagttccaatagtatatacccttcttttctgtatgtaatattttaagatttattcctaggttcaccctttaggtttaccaactaataagattttgttatttcatattcgatatctttcaaaaaaatgagacaaaatattatcaaattatattatgtttttaaaataaaaagtaaaaaaaaaaaaataatagtagttacaacaaaataatttaaaaaaatatttttaacgtcgtcagtaaaacactaaaccctaaatgctaaaccataaaccattggataacccctaaaccattagataaatcctaaactctaaatcaaaaacactaaacactaaaccctaaatcctaaatccttgagtgttttaatgtttagtgttttgatttagaaattaatatttatccaagggcttagagtttacccaaatgtttaggatttatatatggattaagatttagaatttaatgttttgctgacgacgttaaatatatatatatatatatattttttttttttgtaactactactattttaaatttatttatttattaatttttatttttaaaacataatataatttgacaatattttgtttcatttaaaaaaaatatcaaatataaaataacacaattttattggttgataaagctagaggtttactctagggggtgaacccaaaaataagtcatattttagggatgagtagtgtgtatgcctcataccatatgttcaatatataatatatgttcgtgtccatcaaccgtataagtaatctaaaacacttgagatcaattatatacacattaattgtctaatgttcaagaatcaagaccatatattaatgatgattattgatgtgcctataggtatgatgttcatgttgggatacaagacccatacgaagattgtgtagcgacgatgaggctttacacgagaatgagatatcagaaacacaagattgaagcttatcctttagctgccgacgcgcacaaccgtagcaatcaagtggtttggaggcagaacgagttcgagaggatgtctcctgatgaaatgctttccatctctcgctccgactactattgctggtgcttggactccctcgcttga

SEQ ID NO: 142 - protein, 357 aa, Brassica napus
MDYRSSIESSETLRNKCAACYRQFNKMEHLVVHMKISYHSGHEPTCGVCKKHCRSFESLREHLIGPLPKQECKNIFSLRGCRFCMMILESPNARRTHQERCQFSSANAGLTTRMAALGLRDKAMIDYTSSRSPKVVALSCKMVGGGSDGSLDLCARVCITDESDNVVFHTYVKPSMIVTNYRYGTTGIRPENLRDAMPLKHAQRKIQEFLCNGEPMWKIRPRGGRGRILVGHGLDHDLDRLQLEYPSSMMRDTAKYPPLMKTSKLSNSLKYLTQAYLGYDIHVGIQDPYEDCVATMRLYTRMRYQKHKTEAYPQAADAQNRSNQVAWRQNEVERMSPDEMLSISRSDYYCWCLDSLA

SEQ ID NO: 143 - DNA, 1074 bp, Brassica napus
  source 1..1074: mol_type = other DNA
atggactacagatcatctatagaatcatcagaaaccctaaggaacaagtgcgcagcttgttataggcaattcaacaaaatggaacatttagtggtgcacatgaagatctcttatcactccggtcatgagcctacttgtggcgtttgcaagaaacattgccgatcttttgagtccctccgggaacatctcataggaccattgccaaaacaagaatgcaagaacatttttagccttcgcggatgcagattctgcatgatgatcctggaaagcccgaacgctcgtaggacccatcaagagagatgtcaattttcgagcgccaatgctggattgacgactcgtatggcggccttaggcctaagagataaggccatgatcgactacacgtcctcgcggtccccaaaagtggttgcactctcttgcaagatggtaggaggaggaagcgacgggtcgttggatctatgcgcaagggtctgcataacggatgagagtgacaacgttgtgttccacacgtacgtgaaaccgtcaatgatcgtgacgaactataggtacgggacgaccgggatacgtccggagaatctaagggacgccatgccgttgaaacatgctcaaagaaagatccaagaatttctttgtaatggagaacctatgtggaagattcgtccaagaggtgggagagggaggattctcgtgggacatgggctcgaccacgatcttgaccgccttcaacttgaatatccttcttccatgatgagggatactgcaaaataccctccgttgatgaaaacaagcaagctgagcaattctctcaagtacttaacccaagcctatctcgggtatgatattcatgttgggatacaagacccatacgaagattgtgtagcgacgatgaggctgtacacaagaatgagatatcagaaacacaagactgaagcttatcctcaagctgccgacgcacagaaccgtagcaatcaagtggcttggcggcagaacgaggtcgagaggatgtctcctgatgaaatgctctccatctctcgctccgactactattgctggtgcttggactccctcgcttga

SEQ ID NO: 144 - DNA, 2491 bp, Brassica napus
  source 1..2491: mol_type = genomic DNA
atggactacagatcatctatagaatcatcagaaaccctaaggtagccattttttcatcctacgcgtgttgtaccatggatcatcgtttaaaatattaaaaaagaagactcatggagcggcatgcaatatcatacccaaattctatatgtgataaaatgattaaaactaaaaaaaaaggtaaatatatttatatatgtacacgtgcaggaacaagtgcgcagcttgttataggcaattcaacaaaatggaacatttagtggtgcacatgaagatctcttatcactccggtcatgagcctacttgtggcgtttgcaagaaacattgccgatcttttgagtccctccgggaacatctcataggtaaacacgaatatctgtatatatatataaagataaatatatcgtttttatatacactatgaattagtatttttatctttaattctgtaattaatgtcaataggaccattgccaaaacaagaatgcaagaacatttttagccttcgcggatgcagattctgcatgatgatcctggaaagcccgaacgctcgtaggacccatcaagagagatgtcaattttcgagcgccaatgctgtaatcttcgtagttcttatctcaacatacttcacttctcatatttgcgtattttaacttgtaaagaatcaaccacatgaaagatatgttcttacatatatatcatatgatttcttcctttcagggattgacgactcgtatggcggccttaggcctaagagataaggccatgatcgactacacgtcctcgcggtccccaaaagtggttgcactctcttgcaagatggtaggaggaggaagcgacgggtcgttggatctatgcgcaagggtctgcataacggatgagagtgacaacgttgtgttccacacgtacgtgaaaccgtcaatgatcgtgacgaactataggtacgggacgaccgggatacgtccggagaatctaagggacgccatgccgttgaaacatgctcaaagaaagatccaagaatttctttgtaatggagaacctatgtggaagattcgtccaagaggtgggagagggaggattctcgtgggacatgggctcgaccacgatcttgaccgccttcaacttgaatatccttcttccatgatgaggtaacatttctataagaaaaagataaagaggatacatacttataactatatttctttcaatataacctatatttttatttttttttttttttttttttttttttttggtcaactaaataaatgaatgcagttaagggtaattgaacccagcatttctagcactggtaatttctcttagaaccactaggctaaagtcacttttttcctatatttttatgttagcttgtttttttatcgtggaatttctatatcattttgtatgtatattggtgtatgtagggatactgcaaaataccctccgttgatgaaaacaagcaagctgagcaattctctcaagtacttaacccaagcctatctcgggtaatatatctagttttgtttttgtaatattactttacttttgagtctaacatattggaaagtgaatatagatgcatgcatacgttatgtatattgatacatatgtgaagcaaatattatcaattaattatttctcttttttttgctaactaattaattctttctcaaaaaaatatcatcaattaatttattaggtgttaactattcatgctttgtatggcttaaagttataaggaagagaggattcaaaacgtgaaagattaacatgttttaaaatgtattcatcgacatctacatatatattttatatatataccatattatatatagattgtatggctaaactatccaacaaaaaatgaaacactttacatggttaattagacatttttattttacacgagatgctattaccgtaaatttttctctccaaatcgaatacatcaacctgcttatttcgtttttttttttgccaatcgcaaattattcaaatagtacaacagagttttttttttgtattttaaatactatggatgagtgtgtatgcctcctcatatcatatgttgcatataatatatgttcgtgtctacgcaccgaataagtaatataaaacatttgagatcaattagacccattatctgatgttcaagattattaactaatgatgatttttgatggtaattatttaggaaacttaacatttacacccaaaaaaaactaatgatgattattgatgtgcttataggtatgatattcatgttgggatacaagacccatacgaagattgtgtagcgacgatgaggctgtacacaagaatgagatatcagaaacacaagactgaagcttatcctcaagctgccgacgcacagaaccgtagcaatcaagtggcttggcggcagaacgaggtcgagaggatgtctcctgatgaaatgctctccatctctcgctccgactactattgctggtgcttggactccctcgcttga

SEQ ID NO: 145 - protein, 357 aa, Brassica napus
MDYRSPMESSETLRNKCAACYRQFNKMEHLVEHMKISYHSGHEPTCGVCKKHCRSFESLREHLIGPLPKQECKNIFSLRGCRFCMMILESPNARRIHQERCQFSSVNAGLTTRMAALGLRDKVMIDYTSSRSPKMVALSCKMVGGGSDGSLDVCARVCITDENDNVVFHTYVKPSMVVTNYRYETTGIRPENLRDAMPLKHAQRKIQEFLCNGEPMWKIRPRGGKGRILVGHGLDHDPDRLQLEYPSSMMRDTAKYPPLMKTSKLSNSLKYLTQAYLGYDIHVGIQDPYEDCVATMRLYTRMRYQKHKIEAYPLPADVQNRSNQVAWRQSEVERMSPNEMLSISRSDYYCWCLDSLA

SEQ ID NO: 146 - DNA, 1355 bp, Brassica napus
  source 1..1355: mol_type = genomic DNA
atggattacagatcacctatggagtcatcggaaaccctaaggaacaagtgcgcagcttgttataggcaattcaacaaaatggaacatttggtggaacacatgaagatctcttatcactccggtcatgagcctacttgtggagtttgcaagaaacattgccgatcttttgagtccctccgcgaacatctcataggaccattgccaaaacaagaatgcaagaatatttttagccttcgcggatgcagattctgcatgatgatcctcgaaagccctaacgctcgtaggattcatcaagagagatgtcaattttcgagcgtcaatgctggattgacgactcgtatggcagccttaggcctaagagataaagtcatgatcgactacacgtcatcacggtctccaaaaatggttgcactctcttgcaagatggtaggaggaggaagcgacgggtcgttggatgtatgcgcaagggtttgcataacggatgagaacgacaacgttgtgttccatacgtacgtgaaaccgtcaatggtcgtgacgaactataggtacgagacgactggtatacgtccagagaatctgagggacgcaatgccgttgaaacatgcacaaagaaagattcaagaatttctttgtaatggagaacccatgtggaagattcgtccaagaggtgggaaagggaggattctcgtgggacatgggctggatcacgatcctgaccgccttcaacttgaatatccttcttccatgatgagggatactgcaaaatatcctccgttgatgaaaacaagcaagctgagcaattctctcaagtacttaacccaagcctatctcgggtatgatattcatgttgggatacaagacccatacgaagattgtgtagcgacgatgaggctttacacgagaatgagatatcagaaacataagattgaagcatatcctttaccagccgacgtgcagaaccgtagcaatcaagtggcttggaggcagagcgaggtcgaaaggatgtctcctaatgaaatgctctccatctctcgctccgactactattgctggtgcttggactccctcgcttgattcctaaaactatggggttaatttgggaatctctcataattacttcataaactttttcgagattttaatttagtagcgtaaagtcgaataagcattaattctgattttctaatagtatctaaattaattttatagtatgtgtcgtgtgagatgcgaatgttgttcctgtacttctaataacgcatattgctcttaattattaataattataatttttgttgaaattaattatcaaatcacatgttagcttttgtctataaatatatctatatttgtcttag

SEQ ID NO: 147 - DNA, 3507 bp, Brassica napus
  source 1..3507: mol_type = genomic DNA
atggattacagatcacctatggagtcatcggaaaccctaaggtaaccattttcatcctaagcgtgttatatcaagcgttttaattggaaaataaatcccaaagaaaaactcaatggagtggcatgcaatatcatacccaaattctgtagtcaagtgatgaaaaactaaaatttaaagtttttgctaaaatatatttgtatatatatgtaaaaaaatatttatgtatatatgtacacgtgcaggaacaagtgcgcagcttgttataggcaattcaacaaaatggaacatttggtggaacacatgaagatctcttatcactccggtcatgagcctacttgtggagtttgcaagaaacattgccgatcttttgagtccctccgcgaacatctcataggtaaacaagaagctctatataaagagtgacatatagttttatatatacgctatgcatttgtatgttaatttttaattgtgtaatgtcaataggaccattgccaaaacaagaatgcaagaatatttttagccttcgcggatgcagattctgcatgatgatcctcgaaagccctaacgctcgtaggattcatcaagagagatgtcaattttcgagcgtcaatgctgtacgtaatcgtattaatgtccttatctcaatactcctcttctcatatttgcgtaactaaacttgtaaattgaccgcatgaaaaaaaaattcttatataaataatataatatcatatgatttgtcttttttcagggattgacgactcgtatggcagccttaggcctaagagataaagtcatgatcgactacacgtcatcacggtctccaaaaatggttgcactctcttgcaagatggtaggaggaggaagcgacgggtcgttggatgtatgcgcaagggtttgcataacggatgagaacgacaacgttgtgttccatacgtacgtgaaaccgtcaatggtcgtgacgaactataggtacgagacgactggtatacgtccagagaatctgagggacgcaatgccgttgaaacatgcacaaagaaagattcaagaatttctttgtaatggagaacccatgtggaagattcgtccaagaggtgggaaagggaggattctcgtgggacatgggctggatcacgatcctgaccgccttcaacttgaatatccttcttccatgatgaggtgacatttctataaagaagaaaagtaaagaggacacatatatataactagattccttatagtgttacttggtttctggcaacataacccaggtttatgtgagttgttttataattaacgtgaatttctaatatcatttttatatattggtgtatgtagggatactgcaaaatatcctccgttgatgaaaacaagcaagctgagcaattctctcaagtacttaacccaagcctatctcgggtaatatatctacttttgtttctgtaatactactttcgaatataacattaatttggaaaatgaatatagatatatgcatgctttacgtgtattgatacataagtgtatcatgtactatccattaattttttggtgatgtatgggtattgatgctttgtatgggcttaaagctaaaaggaagggattcaaaacgtgaaaagattcatatgttatataatatataccattttctaacaaaaacaaaaagaacttacatagttggagatttttaatttacatgagatgcttactagcgtaatttttatcgccaagttgactacatcaacctgtttatttcatttgatttcctatcaattacaaacagttcaactagtataccattgttttgtatgtaaaactttagggatgagtgtgtatgcctaataatatcatatgttccatataatctgtgttcgtttctacacaccgtagaagtaatctcaaacacttgagatcaattaattatacccattatctaatgtacaacaatatatattaaggatggtattgatgtgcttataggtatgatattcatgttgggatacaagacccatacgaagattgtgtagcgacgatgaggctttacacgagaatgagatatcagaaacataagattgaagcatatcctttaccagccgacgtgcagaaccgtagcaatcaagtggcttggaggcagagcgaggtcgaaaggatgtctcctaatgaaatgctctccatctctcgctccgactactattgctggtgcttggactccctcgcttgattcctaaaactatggggttaatttgggaatctctcataattacttcataaactttttcgagattttaatttagtagcgtaaagtcgaataagcattaattctgattttctaatagtatctaaattaattttatagtatgtgtcgtgtgagatgcgaatgttgttcctgtacttctaataacgcatattgctcttaattattaataattatagtttttgctgaaatctatactattatttggtaagtaatttttcgcattcgagctatcacgttaaaagttggagtagttaaagtcattgttacccttaatgaatgattaaatttatttttagattatattattgattataaattaatattataaaaaaatagccatatataaaaacgaattttaaatttattaaatcagataatttattacaattgatacaataaaagttaactaaacattaaatgtactttaaaaataaaaatataattcttatatattttgtgttgttatccgaagataatatattttaatatattttaaaaatagatttaaaaattcaaagagaattttaattttattaaatcagataattcattaaaattgatataataaaagttatctaaacattaaatttattttaaaaataaaaatataagtcttttatattattctattttttttgtcatatcttatatattttttgttatccgaagataatatattttaatatattttaaaaatagattgaaaaattaaaatatttaagttttaaaatatattatgttatccaaaaaatatttcacattataatatttttaaaataaatataaatctctgtatatatatttttatgtatatatgaaggttttcaagtttgttttaataaaagatattttattaaagtaaacaaaatatggtatataaaatttttattatttaattaaatattaaatatttcaaaaagcaagaaaataattgatttaatggtttttaaattgataatatatttagttgcaatttttttgtaaaattattaagcccgccagtgcgggcaacacacctagttaattagtaatcacttgttagcttttgtctataaatatatctatatttttcttagagtttttaacacatatgaaaaaataatggaaattttcttttttttttataacaaatttacacaataatgagaggtgtttcaaaaaaaaaacacaataaggagagatttttgttgaaattaattatcaaatcacatgttagcttttgtctataaatatatctatatttgtcttag

SEQ ID NO: 148 - protein, 357 aa, Brassica napus
MDYRSSIESSETLRNKCAACYRQFNKMEHLVEHMKISYHSGHEPTCGVCKKHCRSFESLREHLIGPLPKQECKNIFSLRGCRFCMMILESPNARRIHQERCHFSSLNAGLTTRMAALGLRDKALIDYTSSRFPKVVALSCKMVGGGSDGSLDLCARVCITDESDNVVFHTYVKPSMVVTNYRYGTTGIRPENLREAMPLKHAQRKIQEFLCNGEPMWKIRPRGGRGRILVGHGLDHDLDRLQLEYPSSMMRDTAKYPPLMKTSKLSNSLKYLTQAYLGYDIHVGIQDPYEDCVATMRLYTRMRYQKHKIEAYPQAADSQNRSNQVAWRQNEVEKMSPDEMLSISRSDYYCWCLDSLA

SEQ ID NO: 149 - DNA, 1151 bp, Brassica napus
  source 1..1151: mol_type = other DNA
atggattacagatcatctatcgaatcatcagaaaccctaaggaacaagtgcgcagcttgttataggcaattcaacaaaatggaacatttagtggagcacatgaagatctcttatcactccggtcatgagcctacttgtggcgtttgcaagaaacattgccgatcttttgagtccctccgggaacatctcataggaccattgccaaaacaagaatgcaagaacatttttagccttcgcggatgcagattctgcatgatgatcctcgaaagcccaaacgctcgtaggatccatcaagagagatgtcatttttcgagcctcaatgctggattgacgactcgtatggcggccttaggcctaagagataaggccttaatcgactacacgtcctcgcggtttccaaaagtggtggcactctcttgcaagatggtaggaggaggaagcgatgggtcattggatctatgcgcaagggtctgcataactgatgagagtgacaacgttgtgtttcacacgtacgtgaaaccgtcaatggtcgtgacgaactataggtacgggacgactgggatacgtccggagaatttaagggaagcaatgccgttgaaacatgctcaaagaaagatccaagaatttctttgtaatggagaacccatgtggaagattcgtccaagaggtgggagagggaggattctcgtgggacatgggctcgaccacgatcttgaccgccttcaacttgaatatccttcttccatgatgagggatactgcaaaataccctccgttgatgaaaacaagcaagctgagcaattctctcaagtacttaacccaagcctatctcgggtatgatattcatgttgggatacaagacccatacgaagattgtgtagcgacgatgaggctgtacacaagaatgagatatcagaaacacaagattgaagcttatcctcaagctgccgactcacagaaccgtagcaatcaagtggcttggcggcagaacgaggtcgagaagatgtctcctgatgaaatgctctctatctctcgctccgactattattgctggtgcttggactccctcgcttgatttctaaaactatggggctaatttgagtaatctctcacaactactacacaaactcttttcgggattctaatctagta

SEQ ID NO: 150 - DNA, 2248 bp, Brassica napus
  source 1..2248: mol_type = genomic DNA
atggattacagatcatctatcgaatcatcagaaaccctaaggtaaccatttttttcatcatactcgtgttataacttatattaagcgttctaataaaaatattctaaaggaagactcatggagtggcatgcaatatcatacccaaacccaaattctatatgtgataaactgacgaaaactaaaaaaaataggtagacatatttatatatgtacacgtgcaggaacaagtgcgcagcttgttataggcaattcaacaaaatggaacatttagtggagcacatgaagatctcttatcactccggtcatgagcctacttgtggcgtttgcaagaaacattgccgatcttttgagtccctccgggaacatctcataggtaaataagaatatctgtatatatatatatatatacatacatatataaagataaatatatcgtttttatatacactatgcaatagcattttttatctttaattttgtaatgtcaataggaccattgccaaaacaagaatgcaagaacatttttagccttcgcggatgcagattctgcatgatgatcctcgaaagcccaaacgctcgtaggatccatcaagagagatgtcatttttcgagcctcaatgctgtaatcttcttagttcatatctcaatatacttcacttctcatttttgcttattctaacttataaagaatcagccgcatgaaagatatgttcttacatttatatcatataatttcttcatttcagggattgacgactcgtatggcggccttaggcctaagagataaggccttaatcgactacacgtcctcgcggtttccaaaagtggtggcactctcttgcaagatggtaggaggaggaagcgatgggtcattggatctatgcgcaagggtctgcataactgatgagagtgacaacgttgtgtttcacacgtacgtgaaaccgtcaatggtcgtgacgaactataggtacgggacgactgggatacgtccggagaatttaagggaagcaatgccgttgaaacatgctcaaagaaagatccaagaatttctttgtaatggagaacccatgtggaagattcgtccaagaggtgggagagggaggattctcgtgggacatgggctcgaccacgatcttgaccgccttcaacttgaatatccttcttccatgatgaggtaacatttctataagaaacagataaagagaaagaggatacgtacttataactatatttctttcaatataacctatattttatgttagcttgttatatatcgtagaatttctatatcattttgtatgtatactggtgtacgtagggatactgcaaaataccctccgttgatgaaaacaagcaagctgagcaattctctcaagtacttaacccaagcctatctcgggtaatatatctagttttgtttctgtaatattacttttgagtctaacatattggaaagtgaatatagatgcatgcatacgttatgtatattgaaacatatatatgtgaagcaaatattatcaattaattctttctctctttttttttggtaactatttaattctttctcaaaaaaaaatattatcaattaatttatttggtgttatgctattgatgctttgtatacgcttaaagttataaagaatagaggattcaaaacgtgaaagattcacatgttttaaaatatagtcatcgacatctacatatatatattatatatataccatattatatatagattgtatggctaaactatccaacaaaaaaacgaaacacttatttcgttttctttttttttttgccaatcgcaaattattcaaatagtacaacagatttttttttgtattttaaatactatgtatgagtgtgtatgcctcatatcgtatgttgcatataatatatgttcgtgtctacgcatcgaataagtaatataaaacatttgagatcaattagacacattatctgatgttcaagattattaactaatgatgattattgatgtgcttataggtatgatattcatgttgggatacaagacccatacgaagattgtgtagcgacgatgaggctgtacacaagaatgagatatcagaaacacaagattgaagcttatcctcaagctgccgactcacagaaccgtagcaatcaagtggcttggcggcagaacgaggtcgagaagatgtctcctgatgaaatgctctctatctctcgctccgactattattgctggtgcttggactccctcgcttga

SEQ ID NO: 151 - protein, 357 aa, Brassica oleracea
MDCRSSMESSETLRNKCAACYKQFNKFEHLVEHMKISYHSGHEPMCGVCKKHCRSFESLREHLIGPLPKQECKNIFSFRGCRFCLMILETPNARRIHQERCQFSSVNAGLTTRMAALGVRDKAMIDYTSSRSPKVVALSCKMVGGGSDGSLDLCARVCITDESDNVVFHTYVKPPMPVTNYRYEKTGIRPENLRDAMPLKHAQRKIQEFLCNGEPMWKIRPRGGKGRILVGHGLDHDLDRLQLEYPSSMIRDTAKYPPLMKTSKLSNSLKYLTQAYLGYDVHVGIQDPYEDCVATMRLYTRMRYQKHKIEAYPLAADAHNRSNQVAWRQNEFERMSPDEMLSISRSDYYCWCLDSLA

SEQ ID NO: 152 - DNA, 1074 bp, Brassica oleracea
  source 1..1074: mol_type = other DNA
atggattgcagatcatctatggagtcatcggaaaccctaaggaacaagtgcgcagcttgttataaacaattcaacaaattcgaacatttagtggagcacatgaagatctcgtatcactccggtcatgagcctatgtgtggcgtttgcaagaaacattgccgttcttttgagtccctccgggaacatctcatagggccattgccaaaacaagaatgcaagaacattttcagctttcgcggatgcagattctgcttgatgatcctcgaaaccccgaacgctcgtaggatccatcaagagagatgccaattttcgagcgtcaatgctggattgacgactcgtatggcggccttaggcgtaagagataaggccatgatcgactacacgtcgtctagatccccaaaagtggttgcactctcttgcaagatggtaggagggggaagcgacgggtcgctggatctatgcgcaagggtttgcataacggatgagagcgacaacgttgtgttccatacgtacgtgaaaccgccaatgcccgtgacgaactataggtatgagaagaccggcatacgtccggagaatctaagggacgcaatgcccttgaaacatgcacaaagaaagattcaagagtttctttgtaatggagaacccatgtggaagattcgtccaagaggtgggaaagggaggattctcgtgggacatggcctcgatcacgatcttgaccgccttcaacttgaatatccttcttccatgataagggatactgcgaaataccctccgttgatgaaaacaagcaagctgagcaattccctcaagtacttgacccaagcctatctcgggtatgatgttcatgttgggatacaagacccatacgaagattgtgtagcgacgatgaggctttacacgagaatgagatatcagaaacacaagattgaagcttatcctttagctgccgacgcgcacaaccgtagcaatcaagtggcttggaggcagaacgagttcgagaggatgtctcctgatgaaatgctttccatctctcgatccgactactattgctggtgcttggactccctcgcctga

SEQ ID NO: 153 - DNA, 2204 bp, Brassica oleracea
  source 1..2204: mol_type = genomic DNA
atggattgcagatcatctatggagtcatcggaaaccctaaggtaacctatcttccatcgtacgtgtattatattatatcaagcgtttatatgaaaatatcgaaaagaactcatggaggatgtcatccagtatcacacccaaattctataatcaattgatgaaaaataagaaataaagtttttcttaatttatagtttttatacatatgtacacgcacgtgcaggaacaagtgcgcagcttgttataaacaattcaacaaattcgaacatttagtggagcacatgaagatctcgtatcactccggtcatgagcctatgtgtggcgtttgcaagaaacattgccgttcttttgagtccctccgggaacatctcataggtaaatgataagctatatatattaagagaaatatatcgttttatatattcacgacgcatatgtgtatttattttttattgtgctatattattagggccattgccaaaacaagaatgcaagaacattttcagctttcgcggatgcagattctgcttgatgatcctcgaaaccccgaacgctcgtaggatccatcaagagagatgccaattttcgagcgtcaatgctgtaatcttttcttctaatatttgcgcaaattaaaattgttaataatcaaccgcataacaatatattcttacatattttctatgtatcagggattgacgactcgtatggcggccttaggcgtaagagataaggccatgatcgactacacgtcgtctagatccccaaaagtggttgcactctcttgcaagatggtaggagggggaagcgacgggtcgctggatctatgcgcaagggtttgcataacggatgagagcgacaacgttgtgttccatacgtacgtgaaaccgccaatgcccgtgacgaactataggtatgagaagaccggcatacgtccggagaatctaagggacgcaatgcccttgaaacatgcacaaagaaagattcaagagtttctttgtaatggagaacccatgtggaagattcgtccaagaggtgggaaagggaggattctcgtgggacatggcctcgatcacgatcttgaccgccttcaacttgaatatccttcttccatgataaggtggcatttctataaagaaaaacaaaatataaagaggatatatacgtatataactagattcctttagtgttacttgaaatctttcaatatagcccatgattttatgtgtgttttttatatgacgggattttgtatcattttattgctgtatgtagggatactgcgaaataccctccgttgatgaaaacaagcaagctgagcaattccctcaagtacttgacccaagcctatctcgggtaatatatctaattttgtttttgtaataatattttcgaacctaacacattaatttggaaaatgattatagatgcatgcatacattacctatattgatacacatatatatcataataggtgggtattgatgtttgtatgggcttaaatgggagggcttcaaaacgtaagatttacatgttttcaaatatattcatttcaaaatttacacataaacatatatactttgtgtgattagaactatcattgaagtaaataaaatgaaatcattataacaaaaaggaatttacatggttagaaattttactttaccctagatacttaatacttattagcgtagattttccttacatcaacctgtttatttcattttcttttctttttaacgcaaatatatagttccaatagtatttacccttgttttctgtatgtaaaattttagggatgagtagtgtgtatgcctcataccatatgttccatatataatctatgttcgtgtctaccaaccgtataagtaatctaaaacacttgagatcaattatatacacattaattgtctaatgttcaagaatcaagaccatatattaatgacgattattgatgtgcttataggtatgatgttcatgttgggatacaagacccatacgaagattgtgtagcgacgatgaggctttacacgagaatgagatatcagaaacacaagattgaagcttatcctttagctgccgacgcgcacaaccgtagcaatcaagtggcttggaggcagaacgagttcgagaggatgtctcctgatgaaatgctttccatctctcgatccgactactattgctggtgcttggactccctcgcctga

SEQ ID NO: 154 - protein, 351 aa, Brassica oleracea
MESSETLRNKCAACYRQFNKMEHLVEHMKISYHSGHEPTCGVCKKHCRSFESLREHLIGPLPKQECKNIFSLRGCRFCMMILESPNARRIHQERCQFSSVNAGLTTRMAALGLRDKVMIDYTSSRSPKMVALSCKMVGGGSDGSLDVCARVCITDENDNVVFHTYVKPSMVVTNYRYETTGIRPENLRDAMPLKHAQRKIQEFLCNGEPMWKIRPRGGKGRILVGHGLDHDPDRLQLEYPSSMMRDTAKYPPLMKTSKLSNSLKYLTQAYLGYDIHVGIQDPYEDCVATMRLYTRMRYQKHKIEAYPLPADVQNRSNQVAWRQSEVERMSPNEMLSISRSDYYCWCLDSLA

SEQ ID NO: 155 - DNA, 1056 bp, Brassica oleracea
  source 1..1056: mol_type = other DNA
atggagtcatcggaaaccctaaggaacaagtgcgcagcttgttataggcaattcaacaaaatggaacatttggtggaacacatgaagatctcttatcactccggtcatgagcctacttgtggagtttgcaagaaacattgccgatcttttgagtccctccgcgaacatctcataggaccattgccaaaacaagaatgcaagaatatttttagccttcgcggatgcagattctgcatgatgatcctcgaaagccctaacgctcgtaggattcatcaagagagatgtcaattttcgagcgtcaatgctggattgacgactcgtatggcagccttaggcctaagagataaagtcatgatcgactacacgtcatcacggtctccaaaaatggttgcactctcttgcaagatggtaggaggaggaagcgacgggtcgttggatgtatgcgcaagggtttgcataacggatgagaacgacaacgttgtgttccatacgtacgtgaaaccgtcaatggtcgtgacgaactataggtacgagacgactggtatacgtccagagaatctgagggacgcaatgccgttgaaacatgcacaaagaaagattcaagaatttctttgtaatggagaacccatgtggaagattcgtccaagaggtgggaaagggaggattctcgtgggacatgggctggatcacgatcctgaccgccttcaacttgaatatccttcttccatgatgagggatactgcaaaatatcctccgttgatgaaaacaagcaagctgagcaattctctcaagtacttaacccaagcctatctcgggtatgatattcatgttgggatacaagacccatacgaagattgtgtagcgacgatgaggctttacacgagaatgagatatcagaaacataagattgaagcatatcctttaccagccgacgtgcagaaccgtagcaatcaagtggcttggaggcagagcgaggtcgaaaggatgtctcctaatgaaatgctctccatctctcgctccgactactattgctggtgcttggactccctcgcttga

SEQ ID NO: 156 - DNA, 2203 bp, Brassica oleracea
  source 1..2203: mol_type = genomic DNA
atggagtcatcggaaaccctaaggtaaccattttcatcctaagcgtgttatatcaagcgttttaattggaaaataaatcccaaagaaaaactcaatggagtggcatgcaatatcatacccaaattctgtagtcaagtgatgaaaaactaaaatttaaagtttttgctaaaatatatttgtatatatatgtaaaaaaatatttatgtatatatgtacacgtgcaggaacaagtgcgcagcttgttataggcaattcaacaaaatggaacatttggtggaacacatgaagatctcttatcactccggtcatgagcctacttgtggagtttgcaagaaacattgccgatcttttgagtccctccgcgaacatctcataggtaaacaagaagctctatataaagagtgacatatagttttatatatacgctatgcatttgtatgttaatttttaattgtgtaatgtcaataggaccattgccaaaacaagaatgcaagaatatttttagccttcgcggatgcagattctgcatgatgatcctcgaaagccctaacgctcgtaggattcatcaagagagatgtcaattttcgagcgtcaatgctgtacgtaatcgtattaatgtccttatctcaatactcctcttctcatatttgcgtaactaaacttgtaaattgaccgcatgaaaaaaaaattcttatataaataatataatatcatatgatttgtcttttttcagggattgacgactcgtatggcagccttaggcctaagagataaagtcatgatcgactacacgtcatcacggtctccaaaaatggttgcactctcttgcaagatggtaggaggaggaagcgacgggtcgttggatgtatgcgcaagggtttgcataacggatgagaacgacaacgttgtgttccatacgtacgtgaaaccgtcaatggtcgtgacgaactataggtacgagacgactggtatacgtccagagaatctgagggacgcaatgccgttgaaacatgcacaaagaaagattcaagaatttctttgtaatggagaacccatgtggaagattcgtccaagaggtgggaaagggaggattctcgtgggacatgggctggatcacgatcctgaccgccttcaacttgaatatccttcttccatgatgaggtgacatttctataaagaagaaaagtaaagaggacacatatatataactagattccttatagtgttacttggtttctggcaacataacccaggtttatgtgagttgttttataattaacgtgaatttctaatatcatttttatatattggtgtatgtagggatactgcaaaatatcctccgttgatgaaaacaagcaagctgagcaattctctcaagtacttaacccaagcctatctcgggtaatatatctacttttgtttctgtaatactactttcgaatataacattaatttggaaaatgaatatagatatatgcatgctttacgtgtattgatacataagtgtatcatgtactatccattaattttttggtgatgtatgggtattgatgctttgtatgggcttaaagctaaaaggaagggattcaaaacgtgaaaagattcatatgttatataatatataccattttctaacaaaaacaaaaagaacttacatagttggagatttttaatttacatgagatgcttactagcgtaatttttatcgccaagttgactacatcaacctgtttatttcatttgatttcctatcaattacaaacagttcaactagtataccattgttttgtatgtaaaactttagggatgagtgtgtatgcctaataatatcatatgttccatataatctgtgttcgtttctacacaccgtagaagtaatctcaaacacttgagatcaattaattatacccattatctaatgtacaacaatatatattaaggatggtattgatgtgcttataggtatgatattcatgttgggatacaagacccatacgaagattgtgtagcgacgatgaggctttacacgagaatgagatatcagaaacataagattgaagcatatcctttaccagccgacgtgcagaaccgtagcaatcaagtggcttggaggcagagcgaggtcgaaaggatgtctcctaatgaaatgctctccatctctcgctccgactactattgctggtgcttggactccctcgcttga

SEQ ID NO: 157 - protein, 321 aa, Brassica oleracea
MRTSYHSVHEPTCGICNKHCRSFDSLREHLIGPLPKQECKNIFSICGCRFCLTNLESPNARRIHQERCQFSNGLTTRMAVLGLRDNPTIDYTSSRSPRVVALSCKMVGGGSDESLDLCARVCITDESENVIFHTYVKPTLPITNYRYETTGIRPENIRDAMPLKQAQRKIKEFLCYGEPMWKIRPRSGKARILVGHGLDSHLDCLQIEYSSSMIRDTAEYPPLMKTSKLSNSLKYLTQAYLGYDIHVGMQDPYEDCVATMRLYKRIRYQKHKTDAYPLASDTHNTNNYASWRQSELENMSEDELLNLSRSDYYCWCLDSVP

SEQ ID NO: 158 - DNA, 966 bp, Brassica oleracea
  source 1..966: mol_type = other DNA
atgaggacgtcttaccattcggttcatgaacctacgtgtggcatttgcaacaaacactgccgatcttttgattccctccgtgaacacctcattgggccattgccgaaacaggaatgtaagaacattttcagcatctgcggctgcagattctgccttacgaaccttgaaagccccaacgctcgtaggatccatcaggagagatgccaattctcaaacggactaactactcgtatggcggtcttaggcctaagagacaatcctacaatcgattacacttcttccaggtcaccacgagtggtcgcactctcatgcaagatggttggaggagggagtgatgaatcgcttgacctatgcgcgagagtttgcataacagatgagagcgaaaacgtgatttttcacacgtacgtgaagccaacattgcccataacgaattacaggtacgagactacaggaatacgacctgagaatataagggacgcgatgccattgaaacaagcacagagaaagattaaggagtttctctgttatggagaaccaatgtggaagattcgtccaagaagtggaaaagcgaggattctcgtgggacatggacttgatagccatcttgactgtcttcaaattgaatattcttcttccatgataagagatactgcggaataccctccattgatgaaaacaagcaagctaagcaactcgctcaagtacttaacccaagcctatctggggtatgacattcatgtggggatgcaagatccttatgaggactgtgtcgcgacgatgaggctgtacaaaagaatacgatatcaaaaacacaagacggatgcttatccgttggcctcagacacgcataacacaaataactatgcgtcctggagacagagcgagcttgagaatatgtcagaggatgagttgctcaacctttctcggtcagactattactgctggtgcttggactcagttccttga

SEQ ID NO: 159 - DNA, 3108 bp, Brassica oleracea
  source 1..3108: mol_type = genomic DNA
atgaggacgtcttaccattcggttcatgaacctacgtgtggcatttgcaacaaacactgccgatcttttgattccctccgtgaacacctcattggtatatctccaacctctatatatctactctctgactctctaatttggctttctaatttcatttaaaatcatattgtatgtagggccattgccgaaacaggaatgtaagaacattttcagcatctgcggctgcagattctgccttacgaaccttgaaagccccaacgctcgtaggatccatcaggagagatgccaattctcaaacgtcagttatgtaattatacacataagttaatattttcataaatgaattaactacagcatattgctataggtctcgatttcagacacaaaacaagcatttgtgcatctttttgtgttaacaagggtgattggaatgaactctagctttatatttttggctgtagaatttaagctatagatttatttgatgtagattattttgctgtatctttgtaaagcaatattttttctttggaaataaaattctatacacccatattttaattttgtagaaatatttttgttgtgaattttttaaggaaatgaaaactcgattggttgacatatatggttctagagtaaattttggctgtctagagcatctacagccgcatccaacgttttcattttctgatgaaatattttattttgtaaataattttgcaaatgataacttaaataaaaacacactactgtattagaaataaatgaaataaaacagtatattctttctatttgttgcttgatactaatatctaagtaacatttcagggactaactactcgtatggcggtcttaggcctaagagacaatcctacaatcgattacacttcttccaggtcaccacgagtggtcgcactctcatgcaagatggttggaggagggagtgatgaatcgcttgacctatgcgcgagagtttgcataacagatgagagcgaaaacgtgatttttcacacgtacgtgaagccaacattgcccataacgaattacaggtacgagactacaggaatacgacctgagaatataagggacgcgatgccattgaaacaagcacagagaaagattaaggagtttctctgttatggagaaccaatgtggaagattcgtccaagaagtggaaaagcgaggattctcgtgggacatggacttgatagccatcttgactgtcttcaaattgaatattcttcttccatgataaggtaaatataccttttactacacaatttttttggatggtaacgacaattttcactcataccactggtgcagattagtccggatttgattcataatatatgatcattaagaaatagaatatgtatgataagacatattatgtttatttgtaaagagatactgcggaataccctccattgatgaaaacaagcaagctaagcaactcgctcaagtacttaacccaagcctatctggggtaaatattcttcttctttttttgcatctctttttttcaattttacaaaattgaaagacccataaacatgaatgggtacatttttgaaatttaatttcagctaatctgtatataattttaaaaatattcgtcacaagttggtaaatataactttacttaagcaaaaaaaaaaaaattctgtagttcatctgatcaaacctactatcaaagattccataactcataaaacaattattcaactcggaaaaggtttgtctactaaaccatgcatgtatacagattacacgtttctataattttattttaatttgccgtgtgtaatattcggacgcaacaactataaagtaggtatccgatgtacttatgacgtgattaaaagtttttaatccgtgtaaagtacaatatgctgattagctaaaaagtttcttaaaaattcgaataaatcaaccgatgataatcctaggaatatttcgaataactgacgtctctacgatttctatgtctctacctcatacttcgtatcttttattcataaccaaaagtttcgaatttctaatttgctcctctcgtttataaaaggttatcctaaagacacaaaactacaaaattagattattatttttcctaaaatatacaatgcagtaaaaaagttctgtatattttaaactaaagaaatatatttcctctttgttcaggattacggattagtggcagtggcagaaaataacttataacatcacaactagactactttaataaaattttgataggagtcaatattcgtttttggttggagtcaacataatttatttggtaaaaataaattgttttcataaactttatgggtgtcacttgaccccttcataacacactctccgccattgatagtggtaggctctagaacttatggtttctaatataggcttcatttcagtgcatatggtatttttatggtttagggtttataaataataaactttgaggtcataaaataatactcattatattcctgaaattaagattttctagagttagagtatgcacgcttaataaatatttataatttaatttattttttactttattatacactttccaataactttctaccaatgaaatttaatcaattcaaatattctcaattattgtcctcaaaagtataaaaaagtaccttaagaatatagaaaatctatctttgtgtaacaagaaaaaaatctaaaaaatctaaaaaatcttactttcgggaacagagggagtattatgaattggatttacagtacattattaatttataaaagtttatgctatttccttattttgatctaaaataagactgtttaaattaaatctcatttctatcttttccgaccttctaaaggtatgacattcatgtggggatgcaagatccttatgaggactgtgtcgcgacgatgaggctgtacaaaagaatacgatatcaaaaacacaagacggatgcttatccgttggcctcagacacgcataacacaaataactatgcgtcctggagacagagcgagcttgagaatatgtcagaggatgagttgctcaacctttctcggtcagactattactgctggtgcttggactcagttccttga

SEQ ID NO: 160 - protein, 357 aa, Brassica rapa; identical to SEQ ID NO: 133

SEQ ID NO: 161 - DNA, 1392 bp, Brassica rapa
  source 1..1392: mol_type = other DNA
acacacctagcataatacattaataaaaaaactcatcaaaagaattgtttaacttctccccactcttaaattgttgagttctttgtttgcattttcatacgtaccatggattacagatcatctatggagtcatcggaaaccctaaggaacaagtgcgcagcttgttataggcaattcaacaaaatggaacatttggtggaacacatgaagatctcttatcactccggtcatgagcctacttgtggggtttgcaagaaacattgccgatcttttgagtcactccgcgaacatctcataggaccattgccaaaacaagaatgcaagaacatttttagccttcgcggatgcagattctgcatgatgatcctcgaaagccctaacgctcgtaggattcatcaagagagatgccaattttcgagcgtcaatgctggattgacgactcgtatggcagcgttaggccttagagataaagccatgatcgactacacgtcatcacggtctccaaaaatggttgcactctcttgcaagatggtaggaggaggaagcgacgggtcgttggatctatgcgcaagggtttgcataacggatgagaacgacaacgttgtgttccacacgtacgtgaaaccgtcaatggtcgtgacgaactataggtacgagacgaccggtatacgtccagagaatctgagggacgcaatgccgttgaaacatgcacaaagaaagattcaagaatttctttgtaatggagaacccatgtggaagattcgtccaagaggtgggaaagggaggattctcgtgggacatgggctggatcacgatcttgaccgccttcaacttgaatatccttcttccatgatgagggatactgcaaaatatcctccgttgatgaaaacaagcaagctgagcaattctctcaagtacttaacccaagcctatctcgggtatgatattcatgttgggatacaagacccatacgaagattgtgtagcgacgatgaggctttacacgagaatgagatatcagaaacataagattgaagcatatcctttaccagccgacgtgcagaaccgtagcaatcaagtggcttggaggcagagcgaggtcgaaaggatgtctcctaatgaaatgctctccatctctcgctccgactactattgctggtgcttggactccctcgcttaattccaaaaactatggggttaaaatttgagaatctctcataattacttcataaactttttcgagatttttaatttagtagcgtaaagtcgaataagcattacttctgatttcaaatagtatctaaattaattttatagtatgtgtcgtgtgagatgcgaatgttgttcctgtacttctaataacgcatattgctcttaattattaataattatt

SEQ ID NO: 162 - DNA, 2542 bp, Brassica rapa
  source 1..2542: mol_type = genomic DNA
acacacctagcataatacattaataaaaaaactcatcaaaagaattgtttaacttctccccactcttaaattgttgagttctttgtttgcattttcatacgtaccatggattacagatcatctatggagtcatcggaaaccctaaggtaaccattttcatcctaagcgtgtgttatatcaagcgttttaattgaaaaaaaaaatcccaaagaaaaactcaatggagtggcatgcaatatcatacccaaattctgtggtcaactgatgaaaaattaagactaaaattatttttttttctaaaatatatttgtatatatatgttaaaaatatattgatgtatatatgtacacgtacaggaacaagtgcgcagcttgttataggcaattcaacaaaatggaacatttggtggaacacatgaagatctcttatcactccggtcatgagcctacttgtggggtttgcaagaaacattgccgatcttttgagtcactccgcgaacatctcataggtaaataagaagctatatataaagagtgacatatagttttatatatacgctatgcatttgtatgttaatttttaattgtgtaatgtcaataggaccattgccaaaacaagaatgcaagaacatttttagccttcgcggatgcagattctgcatgatgatcctcgaaagccctaacgctcgtaggattcatcaagagagatgccaattttcgagcgtcaatgctgtacgtaatcgtattattgcccttatctcaatactcctcttctcatatttgcgtaactaaacttgtaaattgaccacatgaaaaaaacaattcttatataaataatgtaatatcatatgatttgtctttttcagggattgacgactcgtatggcagcgttaggccttagagataaagccatgatcgactacacgtcatcacggtctccaaaaatggttgcactctcttgcaagatggtaggaggaggaagcgacgggtcgttggatctatgcgcaagggtttgcataacggatgagaacgacaacgttgtgttccacacgtacgtgaaaccgtcaatggtcgtgacgaactataggtacgagacgaccggtatacgtccagagaatctgagggacgcaatgccgttgaaacatgcacaaagaaagattcaagaatttctttgtaatggagaacccatgtggaagattcgtccaagaggtgggaaagggaggattctcgtgggacatgggctggatcacgatcttgaccgccttcaacttgaatatccttcttccatgatgaggtgacatttctataaagaagaaaagtaaagaggacacatatatataactagattccttatagtgttacttggtttctcgcaacacaacccagactttacgtgagttgttttacgattaacgtgaatttctaatatcatttttatatattggtgtgtgtagggatactgcaaaatatcctccgttgatgaaaacaagcaagctgagcaattctctcaagtacttaacccaagcctatctcgggtaatatatctacttttgtgtttgtaatacaactttcgaatataacattaatttggaaaatgaatatagatatatgcatactttacgtgtattgatacataagtgtatcatgtactatccattaatttttttggtgatgtatgggtattgatgctttgtatgggcttaaagctaaaaggaagggattcaaaacgtgaaaagattcatatgttatataatataaccattttctaacaaaaacaaaaagaatttacatagttggagatttttaatttacatgagatgcttactagcgtaacttttatctccaagttgactgaatcaacctatttatttcattttatttcctatcaattacaaatagttcaactagtataccattgttttgtatgtaaaattatagggatgagtgtgtatgcctaatatcatatgttccatataatctgtgttcgcaccgtagaagtaatctaaaacacttgagatcaattaattatacccattatctaatgtacaacaatatatatatattaaggatggtattgatgtgcttataggtatgatattcatgttgggatacaagacccatacgaagattgtgtagcgacgatgaggctttacacgagaatgagatatcagaaacataagattgaagcatatcctttaccagccgacgtgcagaaccgtagcaatcaagtggcttggaggcagagcgaggtcgaaaggatgtctcctaatgaaatgctctccatctctcgctccgactactattgctggtgcttggactccctcgcttaattccaaaaactatggggttaaaatttgagaatctctcataattacttcataaactttttcgagatttttaatttagtagcgtaaagtcgaataagcattacttctgatttcaaatagtatctaaattaattttatagtatgtgtcgtgtgagatgcgaatgttgttcctgtacttctaataacgcatattgctcttaattattaataattatt

SEQ ID NO: 163 - protein, 357 aa, Brassica rapa; identical to SEQ ID NO: 142

SEQ ID NO: 164 - DNA, 1074 bp, Brassica rapa
  source 1..1074: mol_type = other DNA
atggactacagatcatctatagaatcatcagaaaccctaaggaacaagtgcgcagcttgttataggcaattcaacaaaatggaacatttagtggtgcacatgaagatctcttatcactccggtcatgagcctacttgtggcgtttgcaagaaacattgccgatcttttgagtccctccgggaacatctcataggaccattgccaaaacaagaatgcaagaacatttttagccttcgcggatgcagattctgcatgatgatcctggaaagcccgaacgctcgtaggacccatcaagagagatgtcaattttcgagcgccaatgctggattgacgactcgtatggcggccttaggcctaagagataaggccatgatcgactacacgtcctcgcggtccccaaaagtggttgcactctcttgcaagatggtaggaggaggaagcgacgggtcgttggatctatgcgcaagggtctgcataacggatgagagtgacaacgttgtgttccacacgtacgtgaaaccgtcaatgatcgtgacgaactataggtacgggacgaccgggatacgtccggagaatctaagggacgccatgccgttgaaacatgctcaaagaaagatccaagaatttctttgtaatggagaacctatgtggaagattcgtccaagaggtgggagagggaggattctcgtgggacatgggctcgaccacgatcttgaccgccttcaacttgaatatccttcttccatgatgagggatactgcaaaataccctccgttgatgaaaacaagcaagctgagcaattcgctcaagtacttaacccaagcctatctcgggtatgatattcatgttgggatacaagacccatacgaagattgtgtagcgacgatgaggctgtacacaagaatgagatatcagaaacacaagactgaagcttatcctcaagctgccgacgcacagaaccgtagcaatcaagtggcttggcggcagaacgaggtcgagaggatgtctcctgatgaaatgctctccatctctcgctccgactactattgctggtgcttggactccctcgcttga

SEQ ID NO: 165 - DNA, 2500 bp, Brassica rapa
  source 1..2500: mol_type = genomic DNA
atggactacagatcatctatagaatcatcagaaaccctaaggtagccattttttcatcctacgcgtgttgtaccatggatcatcgtttaaaatattaaaaaagaagactcatggagcggcatgcaatatcatacccaaattctatatgtgataaaatgattaaaactaaaaaaaaaggtaaatatatttatatatgtacacgtgcaggaacaagtgcgcagcttgttataggcaattcaacaaaatggaacatttagtggtgcacatgaagatctcttatcactccggtcatgagcctacttgtggcgtttgcaagaaacattgccgatcttttgagtccctccgggaacatctcataggtaaacacgaatatctgtatatatatataaagataaatatatcgtttttatatacactatgaattagtatttttatctttaattctgtaattaatgtcaataggaccattgccaaaacaagaatgcaagaacatttttagccttcgcggatgcagattctgcatgatgatcctggaaagcccgaacgctcgtaggacccatcaagagagatgtcaattttcgagcgccaatgctgtaatcttcgtagttcttatctcaacatacttcacttctcatatttgcgtattttaacttgtaaagaatcaaccacatgaaagatatgttcttacatatatatcatatgatttcttcctttcagggattgacgactcgtatggcggccttaggcctaagagataaggccatgatcgactacacgtcctcgcggtccccaaaagtggttgcactctcttgcaagatggtaggaggaggaagcgacgggtcgttggatctatgcgcaagggtctgcataacggatgagagtgacaacgttgtgttccacacgtacgtgaaaccgtcaatgatcgtgacgaactataggtacgggacgaccgggatacgtccggagaatctaagggacgccatgccgttgaaacatgctcaaagaaagatccaagaatttctttgtaatggagaacctatgtggaagattcgtccaagaggtgggagagggaggattctcgtgggacatgggctcgaccacgatcttgaccgccttcaacttgaatatccttcttccatgatgaggtaacatttctataagaaaaagataaagaggatacatacttataactatatttctttcaatataacctatatttttatgtttttttttttttttttttttttttttttttttttttggcaactaaataaatgaatgcagttaagggtaattgaacccagcatttctagcactggtaatttctcttagaaccactaggctaaagtcacttttttcctatatttttatgttagcttgtttttttatcgtggaatttctatatcattttgtatgtatattggtgtatgtagggatactgcaaaataccctccgttgatgaaaacaagcaagctgagcaattcgctcaagtacttaacccaagcctatctcgggtaatatatctagttttgtttttgtaatattactttacttttgagtctaacatattggaaagtgaatatagatgcatgcatacgttatgtatattgatacatatgtgaagcaaatattatcaattaattatttctcttttttttgctaactaattaattctttctcaaaaaaatatcatcaattaatttattaggtgttaactattcatgctttgtatggcttaaagttataaggaagagaggattcaaaacgtgaaagattaacatgttttaaaatgtattcatcgacatctacatatatattttatatatataccatattatatatagattgtatggctaaactatccaacaaaaaatgaaacactttacatggttaattagacatttttattttacacgagatgctattaccgtaaatttttctctccaaatcgaatacatcaacctgcttatttcgtttttttttttgccaatcgcaaattattcaaatagtacaacagagttttttttttgtattttaaatactatggatgagtgtgtatgcctcctcatatcatatgttgcatataatatatgttcgtgtctacgcaccgaataagtaatataaaacatttgagatcaattagacccattatctgatgttcaagattattaactaatgatgatttttgatggtaattatttaggaaacttaacatttacacccaaaaaaaactaatgatgattattgatgtgcttataggtatgatattcatgttgggatacaagacccatacgaagattgtgtagcgacgatgaggctgtacacaagaatgagatatcagaaacacaagactgaagcttatcctcaagctgccgacgcacagaaccgtagcaatcaagtggcttggcggcagaacgaggtcgagaggatgtctcctgatgaaatgctctccatctctcgctccgactactattgctggtgcttggactccctcgcttga

SEQ ID NO: 166 - protein, 356 aa, Brassica rapa; identical to SEQ ID NO: 139

SEQ ID NO: 167 - DNA, 1071 bp, Brassica rapa
  source 1..1071: mol_type = other DNA
atggattgcagatctatggagtcatcggaaaccctaaggaacaaatgcgcagcttgttataagcaattcaacaaaatggaacatttagtggagcacatgaagatctcgtatcactccggtcatgagcctacctgcggcgtttgcaagaaacattgccgatcttttgagtccctccgagaacacctcatagggccattgccaaaacaagaatgcaagaacattttcagcattctcggatgcagattctgcttgatgatcctcgaaaccccgaacgctcgtaggatccatcaagagagatgccaattttcgagcgtcaatgcgggattgacgactcgtatggcggccttaggcataagagataaggacatgatcgactacacgtcgtctaggtccccaaaagtggttgcactttcttgcaagatggtaggagggggaagcgacgggtcgctggatctatgtgcaagggtttgcataacggatgagggcgacaatgttgtgttccatacgtacgtgaaaccgtcaatggccgtgacgaactataggtatgaaaagaccggcatacgtccggagaatctaagggacgcaatgcccttgaaacatgcacaaagaaagattcaagagtttctttgtaatggagaacccatgtggaagattcgtccaagaggtgggaaagggaggattctcgtgggacatggcctcgatcacgatcttgaccgccttcaacttgaatatccttcttccatgataagggatactgcgaaataccctcccttgatgaaaacaagcaagctgagcaattccctcaagtacttgacccaagcctatctcgggtatgatgttcatgttgggatacaagacccatacgaagattgtgtagcgacgatgaggctttacacgagaatgagatatcagaaacacaagattgaagcttatcctttagctgccgacgcgcacaaccgtagcaatcaagtggtttggaggcagaacgagttcgagaggatgtctcctgatgaaatgctttccatctctcgctccgactactattgctggtgcttggactccctcgcttga

SEQ ID NO: 168 - DNA, 3288 bp, Brassica rapa
  source 1..3288: mol_type = genomic DNA
atggattgcagatctatggagtcatcggaaaccctaaggtaacctatcctccatcgtacgtgtattagattatatcaagcgtttatatgaaaatatcgaaaagaactcagggagggtgtcatccactatcacatccaaattctataatcaattgatgaaaaactagaaataatttgttttccttaaattatagttttatacatatgtacacgtacgtgcaggaacaaatgcgcagcttgttataagcaattcaacaaaatggaacatttagtggagcacatgaagatctcgtatcactccggtcatgagcctacctgcggcgtttgcaagaaacattgccgatcttttgagtccctccgagaacacctcataggtaaatgataacctatatatattaagagaaatgtatcgttttatacattcacgacgcatatgtgtatttatttttaattgtgttatatacatagggccattgccaaaacaagaatgcaagaacattttcagcattctcggatgcagattctgcttgatgatcctcgaaaccccgaacgctcgtaggatccatcaagagagatgccaattttcgagcgtcaatgcggtaatcttttcttctcatatttgcataattaaaattgttaataatcaaccgcacaaaatatatttattcttacatatatgatatgattttctctgtttcagggattgacgactcgtatggcggccttaggcataagagataaggacatgatcgactacacgtcgtctaggtccccaaaagtggttgcactttcttgcaagatggtaggagggggaagcgacgggtcgctggatctatgtgcaagggtttgcataacggatgagggcgacaatgttgtgttccatacgtacgtgaaaccgtcaatggccgtgacgaactataggtatgaaaagaccggcatacgtccggagaatctaagggacgcaatgcccttgaaacatgcacaaagaaagattcaagagtttctttgtaatggagaacccatgtggaagattcgtccaagaggtgggaaagggaggattctcgtgggacatggcctcgatcacgatcttgaccgccttcaacttgaatatccttcttccatgataaggtggcatttctataaagaaaaaatataaagaggatatatatataatagaaaaagactagcatagcaccaaaccaagtttttcctcaaactagcactcaaggatcaaagtcacaaaaataggtttcattaaaaagataaatatactcttagggtttagagttaggggtggagtttttgaattagagtttaaaattttataaaataaaaaataaatactaaaaaattaaaaataaaaattaaaaaaacagtttcaaaaagtatttttgaattctaaaaagaaaatttaaaaaaaaaataaaaaaaaattcgaaaaaaaattataaaaaatgtcgaatctgaaaacatataatctgaaactataaaaaaaaatttcattttttttatttttattttatttgtttttatttattttgtttgttaatttaattttaaaccaaaagtattagacatattttatcatttaatgaatgtcatttttgtgactttttccttctaatgttatttttgagataaaaactcaaaaggtgctattattgacaattgtcactagattcctttagtgttacttgaaatctttcaatatagccaatgattttatgtgtgttttttatatgacgggattttgtatgatcttattgctgtatgtagggatactgcgaaataccctcccttgatgaaaacaagcaagctgagcaattccctcaagtacttgacccaagcctatctcgggtaatatatctaattttgtttttgtaataatattttcaaaccgggtgttgatgctttgtatgggcttaaagttataagggagggcttcaaaacgtaagattcacatgttttctaatatattcatttcaaaatttacacataaacatatatatatagtttgtgtgactagaaatatcattgaagtaaataaaatgaattcattataataaaaacaaatttacatggttagaaattttactttaccctagatacttaatacttattagcgttgattttccttacatcaacctggttatttcattttcttttctttttaacgcaaatatatagttccaatagtatatacccttcttttctgtatgtaatattttaagatttattcctaggttcaccctttaggtttaccaactaataagattttgttatttcatattcgatatctttcaaaaaaatgagacaaaatattatcaaattatattatgtttttaaaataaaaaagtaaaaaaaaaaaataatagtagttacaacaaaataatttaaaaaaatatttttaacgtcgtcagtaaaacactaaaccctaaatgctaaaccataaaccattggataacccctaaaccattagataaatcctaaactctaaatcaaaaacactaaacactaaaccctaaatcctaaatccttgagtgttttagtgtttagtgttttgatttagaaattaatatttatccaagggcttagagtttacccaaatgtttaggatttatatatggattaagatttagaatttaatgttttgctgacgacgttaaatatatatatatatattttttttttttttttgtaactactactattttaaatttatttatttattaattttttatttttaaaacataatataatttgacaatattttgtttcatttaaaaaaaatatcaaatataaaataacacaattttattggttgataaagctagaggtttactctagggggtgaacccaaaaataagtcatattttagggatgagtagtgtgtatgcctcataccatatgttcaatatataatatatgttcgtgtccatcaaccgtataagtaatctaaaacacttgagatcaattatatacacattaattgtctaatgttcaagaatcaagaccatatattaatgatgattattgatgtgcctataggtatgatgttcatgttgggatacaagacccatacgaagattgtgtagcgacgatgaggctttacacgagaatgagatatcagaaacacaagattgaagcttatcctttagctgccgacgcgcacaaccgtagcaatcaagtggtttggaggcagaacgagttcgagaggatgtctcctgatgaaatgctttccatctctcgctccgactactattgctggtgcttggactccctcgcttga

SEQ ID NO: 169 - protein, 357 aa, Brassica rapa
MDYRLSGELSETQRNKCGGCYRQFNKKEHLVEHMRTSYHSVHEPTCGICNKHCRSFDSLREHLIGPLPKQECKNIFSICGCRFCLTILESPNARRIHQERCQFSNVNYGLTARMAVLGLRDNPTIDYTSSRSPRVVALSCKMVGGGSDGSLDLCARVCITDESENVIFHTYMKPTLPITNYRYETTGIRPENIRDAMPLKQAQRKIKEFLCYGEPMWKIRPRSGKARILVGHGLDSHLDCLQLEYSSFMIRDTAEYPPLMKTSKLSNSLKYLTQAYLGYDIHVGMQDPYEDCVTTMRLYKRMRNQKHKTDAYPLASDTHNTNNYASWRQSELESMSEDELLNLSGSDYYCWCLDSVP

SEQ ID NO: 170 - DNA, 1144 bp, Brassica rapa
  source 1..1144: mol_type = other DNA
gttggcataaacaaaaataaacccatcaaagcaaactctattgacacaaaaactgcttgctcaatttacaatggactacagactgtcaggggagctctcagaaacccaaaggaacaagtgtggagggtgttataggcaattcaacaagaaagaacatttggtggaacacatgaggacgtcttaccattcggttcatgaacctacatgtggcatttgcaacaaacactgccgatcttttgattccctccgtgaacatctcattgggccattgccgaaacaggaatgtaagaacattttcagcatctgcggctgcagattctgccttacgatccttgaaagccccaacgctcgtaggatccatcaggagagatgccaattctcaaacgtcaattatggactaactgctcgtatggcggtcttaggcctaagagataatcctacaattgattacacttcttccaggtcaccacgagtggtcgcactctcatgcaagatggttggaggagggagtgatggatcgcttgacctatgcgcgagagtttgcataacagatgagagcgaaaacgtgatttttcacacgtacatgaagccaacattgcccataacgaattacaggtacgagactacaggaatacgacctgagaatataagggacgcgatgccattgaaacaagcacagagaaagattaaggagtttctttgttatggagaaccaatgtggaagattcgtccaagaagtggaaaagcgaggattctcgtgggacatggacttgatagccatcttgactgtcttcaacttgaatattcttctttcatgataagagatactgcggaataccctccattgatgaaaacaagcaagctaagcaactcgctcaagtacttaacccaagcctatctggggtatgacattcatgtggggatgcaagatccttatgaggactgtgtcacgacgatgaggctgtacaaaagaatgcgaaatcaaaaacacaagacggatgcttatccgttggcctcagacacgcataacacaaataactatgcgtcctggagacagagcgagcttgagagtatgtcagaggatgagttgctcaacctttccgggtcagactattactgctggtgcttggactcagttccttga

SEQ ID NO: 171 - DNA, 4394 bp, Brassica rapa
  misc_difference 3519..3876: note = n is a, c, g, or t
  source 1..4394: mol_type = genomic DNA
gttggcataaacaaaaataaacccatcaaagcaaactctattgacacaaaaactgcttgctcaatttacaatggactacagactgtcaggggagctctcagaaacccaaaggtacttttttgtgctattgtgttaaattttggttttctttggatataagttataccatcttcgatcagctgattgaataaggttatttacacccaaaaaaaagattgaataagctttcctttctcacatgtatgttttactactaccatcaacatccaataaatttggaacataaactataagtaacttaagttaggtaaaagaaataggacaatcaatacacaaatctgtaacacctaaacttatatttacattcttagaaaaactaaatgtaccgtaagaatactataaaattgtgtatttagtgtgaaataaaataattgtgaaacaaatatcactaatcatattcgcccatatagaggctttaagtagtaggaaaactactttcgacaccatacctctccaacatctctgaagcacacagccatgtatcatcagctttaatggcagaagccattgctgtccatcgagcggtttctctagccgtttattcaaacgtccgatccctggcggttctatccgattccttatctctgatcaagctcttgaagaagggatggtatcaacctgaactgttcggtatcatgtttgatatctatcactttatgtctttctttgatgttatcacctttgattttatttcttgaaacttcaactctgaggctgattctgtggcaaaatcagtgcttgctatgtctgtaacccactccactgttggagtgtagaaccccctttaagtaatgcaatgctttgtttgatcaaaaaaaaaaaaagtagtaggaaaactagactgttaatgtaccccatcaaatcatctggattttgatttggaaatcctctagttatcaaaaagaaaaattgcgagataaacaatgataaaaaagtatgcatggatgcaggaacaagtgtggagggtgttataggcaattcaacaagaaagaacatttggtggaacacatgaggacgtcttaccattcggttcatgaacctacatgtggcatttgcaacaaacactgccgatcttttgattccctccgtgaacatctcattggtatatctctaacctctatatatctactctctgactctctaatttggctttctaatttcatttaaaatcatattgtatgtagggccattgccgaaacaggaatgtaagaacattttcagcatctgcggctgcagattctgccttacgatccttgaaagccccaacgctcgtaggatccatcaggagagatgccaattctcaaacgtcaattatgtaattatacacataagttaatatttgcataaatgaattaactacagcatattgctataggtctcgatttcagacacaaaacaagcattttgtgcatctttttgtgtttactcaggtgattgggatgaactctagctttatatttttggctataaaatttaagttgtagatttatgtgatgtagattatttttctgtatatttgtaaagcattttttctctggaaataaagctttatatacccacattttaattttgcagagttttttttgttgtgagtttttgaaagaaatgaaagctcgattggttgacatatatgactctagactaaattttggctgtctagaacatttacagcatcaaccaacgatttcattttgtgatgaaatattttattttgtaaataattttgcaaatgataacttaaataaaaacacaatactgtattagacataaatgaaataaaacagtatattctttctatttgttgcttgatactaatatctaagtaacatttcagggactaactgctcgtatggcggtcttaggcctaagagataatcctacaattgattacacttcttccaggtcaccacgagtggtcgcactctcatgcaagatggttggaggagggagtgatggatcgcttgacctatgcgcgagagtttgcataacagatgagagcgaaaacgtgatttttcacacgtacatgaagccaacattgcccataacgaattacaggtacgagactacaggaatacgacctgagaatataagggacgcgatgccattgaaacaagcacagagaaagattaaggagtttctttgttatggagaaccaatgtggaagattcgtccaagaagtggaaaagcgaggattctcgtgggacatggacttgatagccatcttgactgtcttcaacttgaatattcttctttcatgataaggtaaatataccttttactacacaatttttttggatggtaacgacaattttcactcgtaccactggtgcagattagtccgaatttgattcataatatatgatcattaataaatagaatatgtatgataagacatattatgtttatttgtaaagagatactgcggaataccctccattgatgaaaacaagcaagctaagcaactcgctcaagtacttaacccaagcctatctggggtaaatattcttcttcttttttgcatctcttttttctttcaattttacaaaattgaaagacccataaacatgaatgggtacatttttgaaatttaatttcagctcatctgtatataattttaaaaatattcgccacaagttggtaaatataactttacttaaacaaaaattctgtagttcatctgatcaaacctactatcaaagattccataattcataaaacaattattcaactcggaaaaggtttgtctactaaaccatgcatgtatacagattacaagtttctataattttattttaatttgctgtgtgtaatattcggacgtaacaactataaagtaggtatccgatgtacttatgacgtgattaaaagtttttaatccgtgtaaagtacaatatgctgattagctaaaaagtttcttaaaaattcgaataaatcaaccgatgataatcctaggaatatttcgaataactgatatctctacgatttctatgtctctacctcatacttcgtatcttttattcataaccaaaagtttcgaatttctaatttgctcccctcgttttataaaggttatcctaaagacacaaaacaaaaaaaaatagattattatttttcctaaaatatacaatgcagtaaaaaatttctgtatattttaaactaaagaaatatatttcatctttgttcaggatttcggattagtggcagtgacagaaaataacttataacatcacaactagactactttaataaaattttgataggggtcaatattcttttttggttggagtcaacataatttatttggtaaaaataaattgttttcataaactttatgggtgtcacttgaccccttcataacacactctccgccattgattagtggtaggctctgtaagaaagaggaaagcttgaagctttacttaagtgatgaacaaagctttactcaaataaacatacttnnnnnnnnnnnnnnnnnnnnnnnnnnnnnnnnnnnnnnnnnnnnnnnnnnnnnnnnnnnnnnnnnnnnnnnnnnnnnnnnnnnnnnnnnnnnnnnnnnnnnnnnnnnnnnnnnnnnnnnnnnnnnnnnnnnnnnnnnnnnnnnnnnnnnnnnnnnnnnnnnnnnnnnnnnnnnnnnnnnnnnnnnnnnnnnnnnnnnnnnnnnnnnnnnnnnnnnnnnnnnnnnnnnnnnnnnnnnnnnnnnnnnnnnnnnnnnnnnnnnnnnnnnnnnnnnnnnnnnnnnnnnnnnnnnnnnnnnnnnnnnnnnnnnnnnnnnnnnnnnnnnnnnnnnnnnnnnnnnnnnnnnnnnnnnnnnnnnnntctgcaacttcggtttatgttgatcatgggcctcaggcccatctctgttattaggctctagaagttatggtttctaatataggcttcattttcagtgcatatggtatttttatggtttagggtttataaataataaactttgaggtcataaaataatattaggaattggatttacagtacattattaatttataaaagtttatgctatttccttattttgatctaaaataagactgtttaaattgatctcatttctatcttttccgaccttctaaaggtatgacattcatgtggggatgcaagatccttatgaggactgtgtcacgacgatgaggctgtacaaaagaatgcgaaatcaaaaacacaagacggatgcttatccgttggcctcagacacgcataacacaaataactatgcgtcctggagacagagcgagcttgagagtatgtcagaggatgagttgctcaacctttccgggtcagactattactgctggtgcttggactcagttccttga

SEQ ID NO: 172 - protein, 354 aa, Glycine max
MDCRIESAETHRNKCAACFRQFNKLEHLVEHMRISYHSVHEPTCGICRKHCRSFESLREHLIGPLPKQECRDIFSYRGCKFCLKVFESPNSRRIHQEKCQLSGTNAGIIGRFSNLGLRDNLAIGGGARGPQVVALACKMVGGGSDGSLDLCARVCLIDEHENIIFHSYVKPPIPVANYRYETTGITPEYLRDAMPMRHVQRRIHDFLCNGEPMWTIRARGGRARILVGHGLDHDLESLQIEYRAEKIRDTAKYPPLMKTSKLSNSLKYLTQAYLGYDIQTGIQDPYEDCIATMRLYMRMRSQAHRVQEYPLASDPQNRNNFASWRQSEIERMSPEQMLEISRSDYYCWCLDSLY

SEQ ID NO: 173 - DNA, 1384 bp, Glycine max
  source 1..1384: mol_type = other DNA
tgaatattgcctttaggaatcgtccatttatgcaagttggagcaatagtacctctaccctttccctataaatatcaccccactcctacctttgacctcaagtccaagtcttttctattctatttcttacgtaataattatatagattagtataaagaactatggattgcagaatagagagtgccgaaactcacaggaataagtgtgcagcatgcttccgacagttcaacaaactggagcatcttgtggagcacatgaggatctcataccattcggttcatgaaccaacctgtggcatttgcaggaaacactgcaggtcttttgagtctctcagggaacatcttataggtccattgccaaaacaggaatgcagagatatattttcctatagagggtgcaagttttgtttgaaagtctttgaaagccctaactctcgcaggatccaccaagaaaaatgccaactctctggaacaaatgctggaataattggtcgcttttcaaacttgggacttcgtgataatttggctattggtggtggagcaagaggaccacaagtagttgctctagcatgtaaaatggttggaggcggcagtgatggctcacttgatctctgtgcaagagtttgcttaatcgatgaacatgagaacataatattccattcttatgtgaagccaccaattcctgtcgcaaactacaggtatgagacaacaggcatcacaccagaatatctgagggatgcaatgccaatgagacatgttcagaggaggattcatgacttcctttgcaatggtgaacctatgtggacaattcgagcaagaggtggaagagccaggattcttgtgggtcatggtttggatcatgaccttgaaagtttgcaaatagaatatcgagctgaaaaaataagggacactgcaaaataccctccactgatgaaaacaagcaagctgagcaactcactcaagtacttaacacaggcatatcttgggtatgacattcaaactgggattcaggatccttatgaggattgtattgcaacgatgaggctctacatgagaatgagatctcaagcacatagagtacaggaataccctttggcgtctgaccctcagaacaggaataattttgcttcatggaggcaaagtgagattgaaagaatgagtcctgaacaaatgctagaaatttcaaggtctgactactactgctggtgcttggattccttgtattgatccctgaatggtgaaagccaagtacaccaatcagaaagcccatgaacatcagggaattgatcagtacactactaatttaaccgatacaaatatctagtatgcaaaaataaagtacaccaaacagttgtctcttttttactagtcaataatttcttattt

SEQ ID NO: 174 - DNA, 1298 bp, Glycine max
  source 1..1298: mol_type = other DNA
tgcaagttggagcaatagtacctctaccctttccctataaatatcaccccactcctacctttgacctcaagtccaagtcttttctattctatttcttacgtaataattatatagattagtataaagaactatggattgcagaatagagagtgccgaaactcacaggaataagtgtgcagcatgcttccgacagttcaacaaactggagcatcttgtggagcacatgaggatctcataccattcggttcatgaaccaacctgtggcatttgcaggaaacactgcaggtcttttgagtctctcagggaacatcttataggtccattgccaaaacaggaatgcagagatatattttcctatagagggtgcaagttttgtttgaaagtctttgaaagccctaactctcgcaggatccaccaagaaaaatgccaactctctggaacaaatgctggaataattggtcgcttttcaaacttgggacttcgtgataatttggctattggtggtggagcaagaggaccacaagtagttgctctagcatgtaaaatggttggaggcggcagtgatggctcacttgatctctgtgcaagagtttgcttaatcgatgaacatgagaacataatattccattcttatgtgaagccaccaattcctgtcgcaaactacaggtatgagacaacaggcatcacaccagaatatctgagggatgcaatgccaatgagacatgttcagaggaggattcatgacttcctttgcaatggtgaacctatgtggacaattcgagcaagaggtggaagagccaggattcttgtgggtcatggtttggatcatgaccttgaaagtttgcaaatagaatatcgagctgaaaaaataagggacactgcaaaataccctccactgatgaaaacaagcaagctgagcaactcactcaagtacttaacacaggcatatcttgggtatgacattcaaactgggattcaggatccttatgaggattgtattgcaacgatgaggctctacatgagaatgagatctcaagcacatagagtacaggaataccctttggcgtctgaccctcagaacaggaataattttgcttcatggaggcaaagtgagattgaaagaatgagtcctgaacaaatgctagaaatttcaaggtctgactactactgctggtgcttggattccttgtattgatccctgaatggtgaaagccaagtacaccaatcagaaagcccatgaacatcagggaattgatcagtacactactaatttaaccgatacaaatatctagtatgca

SEQ ID NO: 175 - DNA, 2704 bp, Glycine max
  source 1..2704: mol_type = genomic DNA
gacgagagtttatggttggtttgtttgcaacaatattatgaaattcatattaaaacaacgtgacagccgaagtcaatgaaagaaaagagaaataatgggcccaagaatctggaacatacatagatcattacgaatgcaataatgctatacgctaccaacaaactgcacgacaagatagaggagaggaagcatggccaaagaaaaagaaaaaagtagaggaggaatcggaaattaatatactgaatattgcctttaggaatcgtccatttatgcaagttggagcaatagtacctctaccctttccctataaatatcaccccactcctacctttgacctcaagtccaagtcttttctattctatttcttacgtaataattatatagattagtataaagaactatggattgcagaatagagagtgccgaaactcacaggttttcttaatttcttacatccatgcacaagcgcacacatgcatacatcacatatgaacgagtgcatgtgcttctatactattaaacattgaattgcataaaattaaaaatgaattataatcaacagtgcatggatatgtataaataacaatcatgttttttttttttttttttgcaataggaataagtgtgcagcatgcttccgacagttcaacaaactggagcatcttgtggagcacatgaggatctcataccattcggttcatgaaccaacctgtggcatttgcaggaaacactgcaggtcttttgagtctctcagggaacatcttataggtaatactcattcatacgatgattaattgtgaagcaaattaagtgcatgcccttagcatatatcttccatgaagaatatttatcatctgattgtgaatttgtgatgaaacttaatctgcttttccaggtccattgccaaaacaggaatgcagagatatattttcctatagagggtgcaagttttgtttgaaagtctttgaaagccctaactctcgcaggatccaccaagaaaaatgccaactctctggaacaaatgctgtataacttctaactatgaatctaaagaatttacaaatgattatcctagtaaaaatttattctaataatttaaaaacataaagtaatatttttttattaaaaatttgaaaagatattagaattattaattgcgaatttttaactttttgtgcacattattacagggaataattggtcgcttttcaaacttgggacttcgtgataatttggctattggtggtggagcaagaggaccacaagtagttgctctagcatgtaaaatggttggaggcggcagtgatggctcacttgatctctgtgcaagagtttgcttaatcgatgaacatgagaacataatattccattcttatgtgaagccaccaattcctgtcgcaaactacaggttaattggacaattaaacttcctttatattaggccttaaagatttaatttaaccatacattttttttaattgataagcagtttaaccataatatatacctaacgaagctgctgattcattaacaggtatgagacaacaggcatcacaccagaatatctgagggatgcaatgccaatgagacatgttcagaggaggattcatgacttcctttgcaatggtgaacctatgtggacaattcgagcaagaggtggaagagccaggattcttgtgggtcatggtttggatcatgaccttgaaagtttgcaaatagaatatcgagctgaaaaaataaggtaaatagttcaatttaacatttaggcagaacacatgcagcataggtatacactctcatacatatctcaaattaaataattaatctgttcagaaatttttgtaactttgtataaggcaagtaaaagaacactttttattagatcctaactacggttatttatttgtttatttatattagctcctcgatctctagaatcaacaacaaagatggatgccatacatcaaatcataggtttatttcaacacattcaaatattgattttgaattcatattgaataatcagggacactgcaaaataccctccactgatgaaaacaagcaagctgagcaactcactcaagtacttaacacaggcatatcttgggcaagtatccttcacatttttctttactgtaaaatagaagatgcatgtatgttgaattcatgatatatgttttaatattaattaattaacgaggcttctgttttggggcacatatacatataagcaggtatgacattcaaactgggattcaggatccttatgaggattgtattgcaacgatgaggctctacatgagaatgagatctcaagcacatagagtacaggaataccctttggcgtctgaccctcagaacaggaataattttgcttcatggaggcaaagtgagattgaaagaatgagtcctgaacaaatgctagaaatttcaaggtctgactactactgctggtgcttggattccttgtattgatccctgaatggtgaaagccaagtacaccaatcagaaagcccatgaacatcagggaattgatcagtacactactaatttaaccgatacaaatatctagtatgcaaaaataaagtacaccaaacagttgtctcttttttactagtcaataatttcttattttataaataatactcaacttaagcagtagcttacgctactaccatagctagcacccagtgattaaggtacg

SEQ ID NO: 176 - protein, 366 aa, Glycine max
MDAEADPPQNPITRHKCLACYKQYKKKEHLIEHMKTSYHSVHQPRCGVCQKHCKSFESLREHLTGPLPRGICSKIFSQQGCQLCLALFDSPGSLIDHRKICRISAPTCPGTSALPYIDSQFDCQDFSDENHAGEGPGGAVAMDCEMVGGGSDGSLELCARVCLVDEDERLIFHTYVQPEIPVTNYRYDITGLTEEHLRNAMPLKEVREKLLQILHNGESIGKVRLDGGKARLLVGHDLAHDLDCLKMNYPDHMLRDTAKYRPLMKTNLVSHSLKYLTRTYLGYDIQSGTHDPYEDCISVMRLYKRIRSQLHPEEDHGTMTLSNNIVGMPDSWISRELDNLTPDELYAMSRSDYKCWCLDLIPRLSA

SEQ ID NO: 177 - DNA, 1414 bp, Glycine max
  source 1..1414: mol_type = other DNA
acttgaaacagtcgctgctgcgtcttcttcatccgtggtgttagggttttggtcggagtagccttttgcttcgtccaatattttggacatggacgccgaagcggaccctcctcaaaaccctatcacaagacacaaatgcttggcatgctataagcaatataagaagaaagagcatcttattgagcacatgaaaacctcgtatcattctgttcatcagccaagatgtggggtatgtcaaaagcactgcaaatcttttgagtctctgagggaacatcttactggtcctttgccaagaggaatttgttcaaagattttctctcaacagggctgtcaactttgcctggcactatttgatagtcccgggtctctcattgatcatagaaaaatatgtcgcatatctgcccctacttgtccaggaacaagcgcattgccctatattgattcccagtttgattgtcaagatttttctgatgaaaaccatgctggcgagggccctggaggagcagttgcaatggactgtgaaatggttggtggtggaagtgatggttctctggaactttgtgctagagtgtgtttggttgatgaagatgagagattaatcttccatacttatgtacagcctgaaatacctgttactaattacagatatgatataactggattgacagaagagcatcttagaaatgccatgccacttaaggaagttcgagaaaagctactgcaaattctacacaatggagaatccattggcaaagttagactggatggtggaaaagcaaggcttcttgtggggcatgacttagcacacgatttggattgtttaaaaatgaattatcctgatcatatgctgagagacactgcaaagtaccgtccgttgatgaaaaccaacttggtcagccattcactcaagtatctcacccgaacatatcttggttatgatatccaatccggcactcatgacccttatgaagattgtatttctgtcatgagactatacaagagaatacgatctcaacttcatccggaggaagaccatggaacaatgaccctgagtaacaacattgttggcatgcctgatagctggatatctagggaacttgacaacctcacaccggatgaactttatgccatgtctagatcagattataagtgttggtgcttggatttgataccaagattgtcagcctgaattattgatctttgcatttgtccataacatatcataagcatatttcttcaagaactatgagaatggagcatttgcaatgatattttctgtgcatatcttcctatgcatcgagttatcttccagacaagaaaattacgagaaaagataggtgctttatgatggagcttttgtaaatatttagaacgctttgttcaaatcacatgcccttttttagaatgaagactt

SEQ ID NO: 178 - DNA, 3320 bp, Glycine max
  source 1..3320: mol_type = genomic DNA
acttgaaacagtcgctgctgcgtcttcttcatccgtggtgttagggttttggtcggagtagccttttgcttcgtccaatattttggacatggacgccgaagcggaccctcctcaaaaccctatcacaaggtcaatttttgctccctcactttaattttttttttttccatgatgatcaccgtgttgcttctggaggtagccgttgatcggaaattcaaacattgtcataaaataaattaggaaaaatgttaaaatcaaactcatttaatttttaaattggttattactgcactttagaggactccgtctctcatgtgaaagaatattctagttacttttctcagcccgtttgtggtcactttttttttttttttattcccttgggtataattgtttatttgcttagtttctttgaagaatactaacttatttctccctacagacacaaatgcttggcatgctataagcaatataagaagaaagagcatcttattgagcacatgaaaacctcgtatcattctgttcatcagccaagatgtggggtatgtcaaaagcactgcaaatcttttgagtctctgagggaacatcttactggtgagtcatttgtgcattcaatctctgatgtctacagtattggtttcatgttttagctcattatttatcctttttcgtgcctcttttcttccatgttttaggtcctttgccaagaggaatttgttcaaagattttctctcaacagggctgtcaactttgcctggcactatttgatagtcccgggtctctcattgatcatagaaaaatatgtcgcatatctgcccctacttgtccagtaagttgattattggcaacgtaaagcatttatatttatatttaaaataaaatgtcttatgtgtgttattcaccctaagtaatcaaagaaacctgcttacaatcattgtttcttgtctactctttttatgttcttattaggaagtttatgttgtgtgtggaactgttgcagggaacaagcgcattgccctatattgattcccagtttgattgtcaagatttttctgatgaaaaccatgctggcgagggccctggaggagcagttgcaatggactgtgaaatggttggtggtggaagtgatggttctctggaactttgtgctagagtgtgtttggttgatgaagatgagagattaatcttccatacttatgtacagcctgaaatacctgttactaattacaggtacttttttgctctatttctcttttatgtctatccttcctattttttactctttctttcacttctaatccacacaaagcattattgtcaaagagaaaagtggacaaggaaaaaagagtgcttgggttgattttgtttgttattttcagatatgatataactggattgacagaagagcatcttagaaatgccatgccacttaaggaagttcgagaaaagctactgcaaattctacacaatggagaatccattggcaaagttagactggatggtggaaaagcaaggcttcttgtggggcatgacttagcacacgatttggattgtttaaaaatgaattatcctgatcatatgctgaggtagatgcttcttgagtaacttagttatgcttaaatcatgcttgacagaatcattcttgacaaccatgtcttgtacttatcttctttatcagaacttttaggatttgtcatgatgatgaacaaaacaattattctgttttttccctttttttcatatacaaggttacaatgtgtttttatgaattcactttttgaactataaagttgttatactgctcagtttttcttgttatccaaaataagtttccagactttaaagatccagaccattcgatcgcttagatttatattatattgtgaattatgccaggttgattgaattttctatttgaattgacagtttcttatatgagagcagatctgtgtaattattagaactcatcttttgcctatgcttttgtgttacattgcagagacactgcaaagtaccgtccgttgatgaaaaccaacttggtcagccattcactcaagtatctcacccgaacatatcttgggtaagttaattttttcctcaatcctttttcagtcgtaaattgcttcttccattttcaagttttccttctgtttttaaaatcaaattggcatgatctaatctgttcctcctgcatgtaccaattgtacattgaccgtcatttcaatttgctgaggatcataatagattctatgaatcttctttctataataaaataaaatgaaattggtgagcaaaactttctgatcttgaaagaatttcaaaaccaggttaaaaagcaatttggctacatttcagtcaaatgcattttgttttaaatttctgtttgaaaattaaaaattaaaaactcataatcatcttaaacaagcccaaagttattgcatgtgtgagtgtgtcctgtaagttgggacagttctccggacggttaagagtattagtgcaatataaagaaatctgctatattttttctttagtctttaccttgatctcctacttctttgtaaacatcatctggtaaaaaacacatcaattctatttttccacattctggctaaagcagcaaatctatcacaaaaggctgcatccatacttttttgttttacttttaaattgccatagtcactgctttcataatataaccgctagctactatattaattgcagatcccgtaatgtttaatctcatccagtattattgttctttggtttacagttatgatatccaatccggcactcatgacccttatgaagattgtatttctgtcatgagactatacaagagaatacgatctcaacttcatccggaggaagaccatggaacaatgaccctgagtaacaacattgttggcatgcctgatagctggatatctagggaacttgacaacctcacaccggatgaactttatgccatgtctagatcagattataagtgttggtgcttggatttgataccaagattgtcagcctgaattattgatctttgcatttgtccataacatatcataagcatatttcttcaagaactatgagaatggagcatttgcaatgatattttctgtgcatatcttcctatgcatcgagttatcttccagacaagaaaattacgagaaaagataggtgctttatgatggagcttttgtaaatatttagaacgctttgttcaaatcacatgcccttttttagaatgaagacttacctaccttctcactataatataggctctaactaccgacacaaaacataaatggatgcaaggcttgtgt

SEQ ID NO: 179 - protein, 366 aa, Glycine max
MDAEADPPQNPITRHKCLACYKQYKKKEHLIEHMKTSYHSVHQPRCGVCQKHCKSFESLREHLTGPLPRGICSKIFSQQGCQLCLALFDSPGSLIGHRETCRLSAPTCPGTSALPYIDSQFDCQDSSDENHAGEGPGGAVAIDCEMVGGGSDGSLELCARVCLVDEDERLIFHTYVQPEIPVTNYRYDITGLTEEHLKNAIPLKKVREKLLQILQNGESIGKVRLDGGKARLLVGHDLAHDLDCLKMNYPDHMLRDTAKYRPLMKTNLVSHSLKYLTRTYLGYDIQSGTHDPYEDCISVMRLYKRIRSQLHPEEDHGTMTLSNNIVGMPDSWISRELDNLTPDELYAMSRSDYKCWCLDLIPRLSA

SEQ ID NO: 180 - DNA, 1693 bp, Glycine max
  source 1..1693: mol_type = other DNA
aaaaagtaatagttataattttagaaaaattaattttaagagaacaagatatgctgaattggagcatttaccttaaaaaatttctcggtggcgttttgacttgaaacagtcgctgctgcgtcttcttcttcttcatccgtggcgttagggttttggtcggagtagccgttccccatggacgccgaagctgaccctcctcaaaaccctatcacaagacacaaatgcttggcatgctataagcaatataagaagaaagagcatcttattgagcacatgaaaacttcgtatcattctgttcatcagccaagatgcggggtctgtcaaaagcactgcaaatcttttgagtctctgagggaacatcttactggtcctttgccaagaggaatttgttcaaagattttctctcaacagggctgtcaactttgtctggcactatttgatagtcccgggtctctcattggtcatagagaaacatgtcgcttatctgcccctacttgtccaggaacaagtgcattgccctatatagattcccagtttgattgtcaagattcttctgatgaaaaccatgctggggagggccctggaggagcagttgcaatagactgtgaaatggttggtggtggaagtgatggttctctggaactttgtgctagagtgtgtttggttgatgaagatgagagattaatctttcatacatatgtacagcctgaaatacctgttactaattacagatatgatataactggattgacagaagagcatctcaaaaacgccattccacttaagaaagttcgagaaaagctactgcaaattctacagaatggggaatccattggcaaagttagactggatggtggaaaggccaggcttcttgtggggcatgacttagcacacgatttagattgcttaaaaatgaattatcctgatcatatgctgagagacactgcaaagtatcgtcctttgatgaaaacaaatttggtcagccattcgctcaagtatctcacccgaacatatcttggttatgatatccaatccggcactcatgacccttatgaagattgtatttctgtcatgagactatacaagagaatacgatctcaacttcatccggaggaagaccatggaacaatgactctgagtaacaacattgttggcatgcctgatagctggatatctagggaacttgacaacctcacaccagatgaactttatgccatgtcaagatcagattataagtgttggtgcttggatttgataccaagattgtcagcctgaattattgatctttgcatttgtccataacatatcataagcatatttcttcaagaaccatgggaatggagcatttgcaatgatattctctgtgcatatctttctatgcatcgagttatcttccggacaagaaaattatgagaaaagataggggtgcttaatgatggagcttttgtaaatatttagaacgctttgttcaaatcacatgcccttgtttagaatgaagacttacctaccttctcattataatataggctcgaactaccgacaaaaaaacataaatggatgcaaggcttgttcttgatccaatttaaacggagccacttagatctaaattgctgattggtggtacaaggagctttcgttgtcaaaaaaattgatttcaaatacaaaatgtgttaagtaattatttaattttctt

SEQ ID NO: 181 - DNA, 3759 bp, Glycine max
  source 1..3759: mol_type = genomic DNA
ctaacctgcaaacacccctggcagtacttatcataggcggtttaggtagttggttatgtagagtgggtgactattataaatgcttggtgccgtggattaaaaaaaaaaaaaagtaatagttataattttagaaaaattaattttaagagaacaagatatgctgaattggagcatttaccttaaaaaatttctcggtggcgttttgacttgaaacagtcgctgctgcgtcttcttcttcttcatccgtggcgttagggttttggtcggagtagccgttccccatggacgccgaagctgaccctcctcaaaaccctatcacaaggtcaattttctgctcctcaattctccctcactttaattttttatattttatttcattttccattatgatctccgtgttgcttctggaggtagccgttgatcggaaattcaaacattgtcataagtaaattagaaaaatgttagaatcaaactcactgaatttttaaattggttattactgcattttgttctctactgcactctagaagagtcacttatgtgaaagaatattctagttacttttcagtccgtttgtgggactaatgagtatctgctatatataattgccagaattggctatatataatgaatgatggaatgaaatgttccgtggttctgagtagatttaaatatattgaaatcagtgctctcttttgggtataattgtttatttgcttagtttctttgaagaataacttatttctccctacagacacaaatgcttggcatgctataagcaatataagaagaaagagcatcttattgagcacatgaaaacttcgtatcattctgttcatcagccaagatgcggggtctgtcaaaagcactgcaaatcttttgagtctctgagggaacatcttactggttagtcatttctgtactcaatctctcatgtcaacagtatttattggtttcatgttttagctcattatttatcctttttttttcctctatgttttaggtcctttgccaagaggaatttgttcaaagattttctctcaacagggctgtcaactttgtctggcactatttgatagtcccgggtctctcattggtcatagagaaacatgtcgcttatctgcccctacttgtccagtaagttgattattggcaacctaaagcatttatatttatatttaaaataaaatgtcttatgtgtactattcaccctaagtaatcaaagaaacctgctcacaatcagtgtttcttgtctactctttatgttcctattaggaagtttatgttgtgtatggaactgttgcagggaacaagtgcattgccctatatagattcccagtttgattgtcaagattcttctgatgaaaaccatgctggggagggccctggaggagcagttgcaatagactgtgaaatggttggtggtggaagtgatggttctctggaactttgtgctagagtgtgtttggttgatgaagatgagagattaatctttcatacatatgtacagcctgaaatacctgttactaattacaggtacttttttttttctatttctcttttatgtctatccttcctatttctatactctctctttcacttctaatccacacaaagcattattgtcaaagagaaaagtggacagggaaaagagagtgtttgggttgattttgtttgatattttcagatatgatataactggattgacagaagagcatctcaaaaacgccattccacttaagaaagttcgagaaaagctactgcaaattctacagaatggggaatccattggcaaagttagactggatggtggaaaggccaggcttcttgtggggcatgacttagcacacgatttagattgcttaaaaatgaattatcctgatcatatgctgaggtagatgcttcttgaataacttagttatgctaaatcaagcttgacagaatcattcttgacaaccatgtcttgcacttattttttttatcagaacttttaggatttgtcatgatgatgaacaaaacaattattatgttttttttccctttttttttcatatacaaggttacaatgtgtttttatgaattcactttttaaactatatagttgttatactgctcagttttttttgttatccaaattaagtttccggactttaaagatccatactattcaattgcttagatttttattatattgtgaattatgccaggttgattgaattttctatttgaatggacagtttcttatttgagagcagatctgtgtaaattattagaactcatcttttgcctatgcttttgtgttgcattgcagagacactgcaaagtatcgtcctttgatgaaaacaaatttggtcagccattcgctcaagtatctcacccgaacatatcttgggcaagttaattttttcctcaatcctttttcagtcataaattgcttcttccaatttcaagtttttcttctgtttttataatcagattggcatgatctaatcggttcctcctgtatgtacaattgtacattgaccatcatttcaattttctcaggatcataatagactctatgaaacatctgtccatgataaaataaaatgaaattggtgagcaaaactttctgattttgaaagaatttcaaaaccaagttaaaaatcaatttggctccatttcaattagatgcattttgtttcgaaatttatgtttgaaaataaaaaattaaaaactcataatcatcttaaacaagcccaaagttattgcacgtgtgaatgtgtcatgtaagttgggaaagatctccggatggttaggagtattagtgtaatataaagatatctgctttattttttctttagtctttaccttgatctcctactttttagtaaacatcatctggtataaacacattaattcagtagttttccacatttctggctagagcagcaaacctatcacaaatgctgcatcaatacttttttgtttaacttttaaattgcgatagctactgctttcataatataacctgtagctactatattaattgcagatcccataatttttaatctcatttccagtattattgttctttggtttacagttatgatatccaatccggcactcatgacccttatgaagattgtatttctgtcatgagactatacaagagaatacgatctcaacttcatccggaggaagaccatggaacaatgactctgagtaacaacattgttggcatgcctgatagctggatatctagggaacttgacaacctcacaccagatgaactttatgccatgtcaagatcagattataagtgttggtgcttggatttgataccaagattgtcagcctgaattattgatctttgcatttgtccataacatatcataagcatatttcttcaagaaccatgggaatggagcatttgcaatgatattctctgtgcatatctttctatgcatcgagttatcttccggacaagaaaattatgagaaaagataggggtgcttaatgatggagcttttgtaaatatttagaacgctttgttcaaatcacatgcccttgtttagaatgaagacttacctaccttctcattataatataggctcgaactaccgacaaaaaaacataaatggatgcaaggcttgttcttgatccaatttaaacggagccacttagatctaaattgctgattggtggtacaaggagctttcgttgtcaaaaaaattgatttcaaatacaaaatgtgttaagtaattatttaattttctt

SEQ ID NO: 182 - DNA, 1334 bp, Glycine max
  source 1..1334: mol_type = other DNA
gagaacaagatatgctgaattggagcatttaccttaaaaaatttctcggtggcgttttgacttgaaacagtcgctgctgcgtcttcttcttcttcatccgtggcgttagggttttggtcggagtagccgttccccatggacgccgaagctgaccctcctcaaaaccctatcacaagacacaaatgcttggcatgctataagcaatataagaagaaagagcatcttattgagcacatgaaaacttcgtatcattctgttcatcagccaagatgcggggtctgtcaaaagcactgcaaatcttttgagtctctgagggaacatcttactggtcctttgccaagaggaatttgttcaaagattttctctcaacagggctgtcaactttgtctggcactatttgatagtcccgggtctctcattggtcatagagaaacatgtcgcttatctgcccctacttgtccaggaacaagtgcattgccctatatagattcccagtttgattgtcaagattcttctgatgaaaaccatgctggggagggccctggaggagcagttgcaatagactgtgaaatggttggtggtggaagtgatggttctctggaactttgtgctagagtgtgtttggttgatgaagatgagagattaatctttcatacatatgtacagcctgaaatacctgttactaattacagatatgatataactggattgacagaagagcatctcaaaaacgccattccacttaagaaagttcgagaaaagctactgcaaattctacagaatggggaatccattggcaaagttagactggatggtggaaaggccaggcttcttgtggggcatgacttagcacacgatttagattgcttaaaaatgaattatcctgatcatatgctgagagacactgcaaagtatcgtcctttgatgaaaacaaatttggtcagccattcgctcaagtatctcacccgaacatatcttggttatgatatccaatccggcactcatgacccttatgaagattgtatttctgtcatgagactatacaagagaatacgatctcaacttcatccggaggaagaccatggaacaatgactctgagtaacaacattgttggcatgcctgatagctggatatctagggaacttgacaacctcacaccagatgaactttatgccatgtcaagatcagattataagtgttggtgcttggatttgataccaagattgtcagcctgaattattgatctttgcatttgtccataacatatcataagcatatttcttcaagaaccatgggaatggagcatttgcaatgatattctctgtgcatatct

SEQ ID NO: 183 - protein, 336 aa, Zea mays
MDSRRESSETLRNKCAACFRQYNRMEHLVEHMKVSYHSVHEPRCGVCGKHCRSLESLREHLIGPLPKVECARVFGVRGCSICLNVLDSSAAVRYHRAACQYSRAAPMPRGGSMTGRAVALACKMVGGGSDGSMDLCARVCLVGEDEHVIFQTYVKPTLPVTNYRYEVTGIRPEYLRDAMPLKVAQRRIQEILCNGESLWKLRPRSYGRAKVLVGHGLDHDLERLGLEYPAFMIRDTAKYPPLMKTSKLSNSLKYLTQAYLGYDIHTGIQDPYEDCVATMRLYIRMRSQAHQRDYNSGSGEAQNNYPAWRQRELDRMSPEELLALSASDYYCWCLDY

SEQ ID NO: 184 - DNA, 1330 bp, Zea mays
  source 1..1330: mol_type = other DNA
atcgccagcctcgagatcgatctctctcaagggaccttgcttgccgccacccccaccgcagttacagttatagctagggatctgaggactagctgatggacagcaggagggagtcctcggagaccttgaggaacaaatgcgcagcctgcttcaggcagtacaacaggatggagcacctggtggagcacatgaaggtctcgtaccactcggtgcacgagcccaggtgcggcgtctgcgggaagcactgccgctccttggagtcgctcagggagcatctcatcgggccgttgcccaaggtggagtgcgcgcgggtcttcggcgtccgcggctgcagcatctgcctcaacgttctcgacagcagcgccgccgtcagataccaccgtgcggcctgccagtactctcgtgctgctccgatgcccaggggcggtagcatgactgggcgcgcggtcgccctggcttgcaagatggtagggggaggaagcgacggctccatggacctttgtgcgagggtgtgcctcgttggagaagatgagcacgtcatcttccagacctatgtcaaacctacactccctgtcacgaactacaggtatgaagtgactgggataaggccagagtacctgagggacgcaatgccgctcaaggttgcgcagagaagaatccaggaaatcctgtgcaacggggagtcactgtggaagttacgcccaagaagctatggtagggcaaaggtactcgttggtcatggcctcgaccatgaccttgagcgcctagggttagagtacccggcattcatgatcagggatactgcaaaatacccaccactaatgaagactagcaagctgagtaactccctcaagtaccttacacaagcatacctcgggtatgacatccatactggcattcaggacccctacgaggactgcgtcgcaacaatgaggctgtacatcaggatgagatcacaggctcaccagagagattacaactccggctctggcgaggcccagaacaactatccagcctggaggcagagggagctcgacaggatgagcccagaagaactcctggcactttcagcatcagactactactgctggtgcctggattactaaaccgatcggcttataaggaaaataaggcaggcgaacgttgtcggttgacatgttccgtctatggcgatcatctttagatgtacaagtagcttgcggctttgctatattgggggttaattaaagcgtataaacaaaggattctatataaatgtattgatgccttagatctgtataagaagcaatatcatgatttatgatgcatgtggaaagaggattttcctgct

SEQ ID NO: 185 - DNA, 2410 bp, Zea mays
  source 1..2410: mol_type = genomic DNA
atcgccagcctcgagatcgatctctctcaagggaccttgcttgccgccacccccaccgcagttacagttatagctagggatctgaggactagctgatggacagcaggagggagtcctcggagaccttgaggtaagagagatgctattctttcagctgtcattgatatgcgtactgcaaatggccgtgtgcaggactgattaagcgcatgccatatactgcacctgtcccttgtgggggatatatatacatattaaacactactcctattattattctaacaagacatcaagtcagttcactgatctatgtaattaataaggcttgacacatgcatggccatttcttgtaaccatgatcctgtaaagagactgtggttgcgaggaggccgggctagctgttcatgcatgaaactgctcgtgcaaggatcagcttggcgccctctcgcattggatagatcctacatatgttcctgaaggccagaatccatacatacatgatgaatgatctcatacatgtcatgtccatgaccatcaggaacaaatgcgcagcctgcttcaggcagtacaacaggatggagcacctggtggagcacatgaaggtctcgtaccactcggtgcacgagcccaggtgcggcgtctgcgggaagcactgccgctccttggagtcgctcagggagcatctcatcggtacgtacgtactgcagaaacaaagctctctgccccgaagaaaccaaaagacgtacgtacaggcgtggtttcgatcagttctgacgcttcttcgattcttcctgttctccaccgtaccgtgtctccagggccgttgcccaaggtggagtgcgcgcgggtcttcggcgtccgcggctgcagcatctgcctcaacgttctcgacagcagcgccgccgtcagataccaccgtgcggcctgccagtactctcgtgctgctccggtacgatgcgtggtcacctgatatcacttgagagctcgatcggatgcattgccttccatcgccttttgcctgtggcttttggtcagtagtactagctagattctgatattgttttccactccaccatcgtggtcccagatgcccaggggcggtagcatgactgggcgcgcggtcgccctggcttgcaagatggtagggggaggaagcgacggctccatggacctttgtgcgagggtgtgcctcgttggagaagatgagcacgtcatcttccagacctatgtcaaacctacactccctgtcacgaactacaggtaatcctcctacttctcgtgcagttgccatcatgtccgttactaagttggccatctttcagcgagtactataccatatggagtatatgatagacgttgccggatcctattaaaataaagataaagagtagttacagctgggagtagaaagaaatttcgttccatgtccttgaaagttgaagctgaccggaagatgactatgtgtgtaacatgttttcaggtatgaagtgactgggataaggccagagtacctgagggacgcaatgccgctcaaggttgcgcagagaagaatccaggaaatcctgtgcaacggggagtcactgtggaagttacgcccaagaagctatggtagggcaaaggtactcgttggtcatggcctcgaccatgaccttgagcgcctagggttagagtacccggcattcatgatcaggtgaggagcaggaaaaaaaaacgcagttaattaccagttaccacagtggttttgcctttttgacagaaattgttgtgcatatgcagggatactgcaaaatacccaccactaatgaagactagcaagctgagtaactccctcaagtaccttacacaagcatacctcgggtatgtcaacttcttgggtggtctatatatacaatcagaaccatcatcgtactgttatctaatatatgtgaaataatgctgacgagattctgtcttcttgtaggtatgacatccatactggcattcaggacccctacgaggactgcgtcgcaacaatgaggctgtacatcaggatgagatcacaggctcaccagagagattacaactccggctctggcgaggcccagaacaactatccagcctggaggcagagggagctcgacaggatgagcccagaagaactcctggcactttcagcatcagactactactgctggtgcctggattactaaaccgatcggcttataaggaaaataaggcaggcgaacgttgtcggttgacatgttccgtctatggcgatcatctttagatgtacaagtagcttgcggctttgctatattgggggttaattaaagcgtataaacaaaggattctatataaatgtattgatgccttagatctgtataagaagcaatatcatgatttatgatgcatgtggaaagaggattttcctgct

SEQ ID NO: 186 - protein, 350 aa, Zea mays
MDSSSDAHGRHRCAACFRQFNKMEHLVEHMRAARHSGHEPRCDICRKHCRSFEALRDHLGVGGSTLPKAASCADAFAARGCAICLRVLAGAGAASLGAHRAACRLSRTPPPRALQQHHRTQPQGGALALGCKMVGAGSDGSLDVCARVCVIDEQENVLFEAFVRPLLPVTHYRYETTGIRPEHLRDGASVTVKSAQRRVEELLLDGEQPWRARTSRGRARLLVGHGLDHDLHALHMDYPAYLKRDTATYPPLMKTSKLSNSLRFLTLNYLGYEIQTGHQHPFEDCVAAMRLYRRMRGQQHHPRADAHAPAPAADDQQPFPSWRQRELERMTPEDLLRLSTPDYHCWCLDA

SEQ ID NO: 187 - DNA, 1421 bp, Zea mays
  source 1..1421: mol_type = other DNA
atcggtcgaccagatcaaccgagcagttggggtgaacgaaccgtggatcgacgtcgtactcgtacgtacgtacgtactgtacgtgacgatggatagctcctcggacgctcacgggcgtcacaggtgcgcggcgtgcttccggcagttcaacaagatggagcacctggtggagcacatgcgggcggcgcggcactcggggcacgagccccgctgcgacatctgccgcaagcactgccgctccttcgaggcgctcagggaccacctcggcgtcggcggctccacgctgcccaaggccgccagctgcgccgacgccttcgccgcgcggggctgcgccatctgcctccgcgtcctcgccggcgccggcgccgcgtcgctcggagcccaccgcgcggcgtgccggctctcgcgcaccccgccgccgagggcgctgcagcagcatcaccggacgcagccgcaaggaggcgcgctcgcgctgggctgcaagatggtcggcgccggcagcgacggatccctggacgtgtgcgcgcgggtgtgcgtcatcgacgagcaggagaacgtcctgttcgaggccttcgtgaggccgctccttcccgtgacgcactaccggtacgagacgacggggatccggccggagcacctccgcgacggcgcgagcgtgacggtgaagagcgcgcagcgccgggtggaggagctgctgctcgacggcgagcagccgtggagggcgcgcaccagccggggcagggcgcgcctgctggtcggccacggcctcgaccacgacctccacgcgctgcacatggactacccggcctacctcaagcgcgacacggccacgtacccgccgctcatgaagaccagcaagctcagcaactcgctccgcttcctcacgctcaactacctcggctacgagatccagacggggcaccagcaccccttcgaggactgcgtcgccgccatgcgcctctaccgcaggatgcgcgggcagcagcaccaccccagggccgacgcacacgcaccggcgccggccgcggacgaccagcagccgttcccgtcgtggaggcagcgggagctggagcgcatgacgcccgaggacctcctccggctctccacgccggactaccactgctggtgcctcgatgcgtagcgtgtggcttgagcatctatctccgtcagaggctcagagccagcccgagcgcatcctgatcgcgttcccgccccatgaccaatgacgtggtcgtgtataagattctgcaccgttcagccgttcgtcagctcctccggctcacacgaacttctgtaccaagtatctaatctatccatagctactccaaaagtacaatccgatccacccgtatgattgagggagagggacagagaatgtacctgtggatccgttcgatataaaacgcctgttagagtatata

SEQ ID NO: 188 - DNA, 1890 bp, Zea mays
  source 1..1890: mol_type = genomic DNA
atcggtcgaccagatcaaccgagcagttggggtgaacgaaccgtggatcgacgtcgtactcgtacgtacgtacgtactgtacgtgacgatggatagctcctcggacgctcacgggtgagctttctttcacaaactatatgcatgctttgaggtaaactctaccgtgcttcggacacctgggttttgttttgtggaccatttcgatcactaaaatctagctccatgcatctgtgtctgttcgaagtcgttttttcttgtttcaatggcaatgcctactatgattttactagaaccattgtggacattattatcttcactcctaacagcgccctgccaaggacatatgctactgctactctaccagtcaaaggcacttttttctatggccggcctggctgtgaaatctatggccggtcattttttcttcttcgtgttagaacaaaatccaaatagacttgtatttaaagaccagcactttgaacttgtgttaggaatcttgtataaaaaaaagaaaagtaaaaatacgagcggctccccgtctactcgtaacgtacagtgtaacgaggaatgacttgtttggcaggcgtcacaggtgcgcggcgtgcttccggcagttcaacaagatggagcacctggtggagcacatgcgggcggcgcggcactcggggcacgagccccgctgcgacatctgccgcaagcactgccgctccttcgaggcgctcagggaccacctcggcgtcggcggctccacgctgcccaaggccgccagctgcgccgacgccttcgccgcgcggggctgcgccatctgcctccgcgtcctcgccggcgccggcgccgcgtcgctcggagcccaccgcgcggcgtgccggctctcgcgcaccccgccgccgagggcgctgcagcagcatcaccggacgcagccgcaaggaggcgcgctcgcgctgggctgcaagatggtcggcgccggcagcgacggatccctggacgtgtgcgcgcgggtgtgcgtcatcgacgagcaggagaacgtcctgttcgaggccttcgtgaggccgctccttcccgtgacgcactaccggtacgagacgacggggatccggccggagcacctccgcgacggcgcgagcgtgacggtgaagagcgcgcagcgccgggtggaggagctgctgctcgacggcgagcagccgtggagggcgcgcaccagccggggcagggcgcgcctgctggtcggccacggcctcgaccacgacctccacgcgctgcacatggactacccggcctacctcaagcgcgacacggccacgtacccgccgctcatgaagaccagcaagctcagcaactcgctccgcttcctcacgctcaactacctcggctacgagatccagacggggcaccagcaccccttcgaggactgcgtcgccgccatgcgcctctaccgcaggatgcgcgggcagcagcaccaccccagggccgacgcacacgcaccggcgccggccgcggacgaccagcagccgttcccgtcgtggaggcagcgggagctggagcgcatgacgcccgaggacctcctccggctctccacgccggactaccactgctggtgcctcgatgcgtagcgtgtggcttgagcatctatctccgtcagaggctcagagccagcccgagcgcatcctgatcgcgttcccgccccatgaccaatgacgtggtcgtgtataagattctgcaccgttcagccgttcgtcagctcctccggctcacacgaacttctgtaccaagtatctaatctatccatagctactccaaaagtacaatccgatccacccgtatgattgagggagagggacagagaatgtacctgtggatccgttcgatataaaacgcctgttagagtatata

SEQ ID NO: 189 - protein, 336 aa, Brachypodium distachyon
MDSRRETSETLRNKCAACFRQYNKMEHLVEHMKVSYHSVHEPRCGACGKHCRSFESLREHLIGPLPKVECARVFAARGCGICLNIFDSPATVRYHRPACQYSRAAPMPKAGSARGRAVAMACKMVGGGSDGSLDLCARLCIIGEDETVIFQTYVKPTAPVTNYRYEVTGIRPEYLRDAMPLKLAQRRVQDILCNGEPLWKIRPRSYGRARVLVGHGVDQDLERLGLEYPAFMIRDTAKYPPLMKTSKLSNPLKYLTQAYLGYDVHTGVQDPYEDCVAAMRLYIRMRSQAHPRDYASGSGEVQNNYPAWRQRELERMSPEELLALSGSDYYCWCLDP

SEQ ID NO: 190 - DNA, 1503 bp, Brachypodium distachyon
  source 1..1503: mol_type = other DNA
cgcggtttcagagttcagagagcttgatcgatcgatctatccataggaatttcaggagcgatggacagcaggagggagacctcggagaccttgaggaacaagtgtgcggcgtgcttcaggcagtacaacaagatggaacatctggtggagcacatgaaggtgtcgtatcactccgtccacgagcccaggtgcggcgcctgcgggaagcactgccgctccttcgagtccctcagggagcacctcatcgggcctttgcccaaggtggagtgcgcgcgcgtcttcgccgcccggggctgcggcatctgcctcaacatcttcgacagcccggccaccgtcagatatcaccgccccgcctgccagtactcccgtgcggctccgatgcctaaggctggctcagcacgaggacgcgcggtcgccatggcctgcaagatggtcggaggaggaagcgacggctcgctggacctctgcgctagactgtgcatcattggggaagacgagaccgtcatcttccagacctacgtgaaacccacggcgcctgtcaccaactacaggtatgaggtgactggaataaggccggagtacctgagggacgcaatgccactgaagcttgcccagaggagggtccaggacatcctgtgcaacggggagccgctgtggaagatccggccgaggagctatggaagggcaagggtcctcgttggacatggcgtggaccaggaccttgagcgcctagggttggagtacccagcattcatgatcagggacactgcaaagtatccaccactgatgaaaaccagcaagctgagcaatcccctaaagtaccttacacaagcatatcttgggtatgatgtgcacactggcgttcaggatccgtacgaggactgcgtggcagcgatgagactatatatcaggatgagatcgcaagctcacccgagagactatgcctccggttcaggggaggtgcagaataactacccggcctggaggcagagggagctggagaggatgagcccagaagaactgctggcactttcaggatcagattactactgctggtgcctggacccctaaactgatgagctgaagagaacaaggcaggaccaatggtgctggttttctcatattccatccataataataatgattacgtgtgtctaattatctttggacttatgtatggtgggattgagtatcatatcggtgatctagagttgtatgagtctttatttaatagcaaccatatatagcaagaggatttctactttcctttatgcatattgaaaaccacaaaatcagtagttagccaaaaaaatgacaaaatcagtgcaacaattatacaacacacgggcaaataatcaggcctataacatcatatttaatgagtttacactctgtagtctgtacatgttgtgagactatgtcagtactaaggatacattatgcagcagaatatcgtacctgtgcaaatcagcgataatcgagtgtgtgcacaactgtcgaaat

SEQ ID NO: 191 - DNA, 2339 bp, Brachypodium distachyon
  source 1..2339: mol_type = genomic DNA
cgcggtttcagagttcagagagcttgatcgatcgatctatccataggaatttcaggagcgatggacagcaggagggagacctcggagaccttgaggtaagcatgcgcaaagctgataagaaatgactgtcattcttgtattgtgctaattttgtgtgtcccatgataaagagagatctactcattaatctagcttgtaaaccttgaaactcaaacctaatactccgtatgagatttctttattttttcccttccaaactagctgtctccgagctagctacacaaggctacatttttttttaatctctgcgaagtgctaaataaacggccagaactggcacccatttctactgcatttgaccgatcgatgcttgccttgtcctgtaattacatgttaaatatcctaatacgtgtgtgtgtgcatgtgtccccatggatggatatatcaggaacaagtgtgcggcgtgcttcaggcagtacaacaagatggaacatctggtggagcacatgaaggtgtcgtatcactccgtccacgagcccaggtgcggcgcctgcgggaagcactgccgctccttcgagtccctcagggagcacctcatcggtaagcaaacaattatccacaaatggattaagattttgttagacacatactgcaaattctgatctgtgcgtgtcttgatgaatgaagggcctttgcccaaggtggagtgcgcgcgcgtcttcgccgcccggggctgcggcatctgcctcaacatcttcgacagcccggccaccgtcagatatcaccgccccgcctgccagtactcccgtgcggctccggtaatgcctccgtcgttgtcgtccatgaactctatatattcagtttgcacggaggctgatgcttcttttcctccccctctattctgtcagatgcctaaggctggctcagcacgaggacgcgcggtcgccatggcctgcaagatggtcggaggaggaagcgacggctcgctggacctctgcgctagactgtgcatcattggggaagacgagaccgtcatcttccagacctacgtgaaacccacggcgcctgtcaccaactacaggtatagcctgatcgacattgccctggaatccatcactggttctgcttaatgggctgtttgctgaaatgattttcctcggttcaggtatgaggtgactggaataaggccggagtacctgagggacgcaatgccactgaagcttgcccagaggagggtccaggacatcctgtgcaacggggagccgctgtggaagatccggccgaggagctatggaagggcaagggtcctcgttggacatggcgtggaccaggaccttgagcgcctagggttggagtacccagcattcatgatcaggtgagcaccacagcacaatttttttttgctatggccctaattaagatgtactggtagatctttgccgctttgcttagtgagttatggttcagggcctacagttttttttttcaatctctggatatgcagggacactgcaaagtatccaccactgatgaaaaccagcaagctgagcaatcccctaaagtaccttacacaagcatatcttgggtatgtcactccctaccctgggctacacaatctctctgcacctttggtcattttcttaatgctgaagagattgtccgtctatcccatttgcaggtatgatgtgcacactggcgttcaggatccgtacgaggactgcgtggcagcgatgagactatatatcaggatgagatcgcaagctcacccgagagactatgcctccggttcaggggaggtgcagaataactacccggcctggaggcagagggagctggagaggatgagcccagaagaactgctggcactttcaggatcagattactactgctggtgcctggacccctaaactgatgagctgaagagaacaaggcaggaccaatggtgctggttttctcatattccatccataataataatgattacgtgtgtctaattatctttggacttatgtatggtgggattgagtatcatatcggtgatctagagttgtatgagtctttatttaatagcaaccatatatagcaagaggatttctactttcctttatgcatattgaaaaccacaaaatcagtagttagccaaaaaaatgacaaaatcagtgcaacaattatacaacacacgggcaaataatcaggcctataacatcatatttaatgagtttacactctgtagtctgtacatgttgtgagactatgtcagtactaaggatacattatgcagcagaatatcgtacctgtgcaaatcagcgataatcgagtgtgtgcacaactgtcgaaat

SEQ ID NO: 192 - DNA, 1207 bp, Brachypodium distachyon
  source 1..1207: mol_type = other DNA
ggtttcagagttcagagagcttgatcgatcgatctatccataggaatttcaggagcgatggacagcaggagggagacctcggagaccttgaggaacaagtgtgcggcgtgcttcaggcagtacaacaagatggaacatctggtggagcacatgaaggtgtcgtatcactccgtccacgagcccaggtgcggcgcctgcgggaagcactgccgctccttcgagtccctcagggagcacctcatcgggcctttgcccaaggtggagtgcgcgcgcgtcttcgccgcccggggctgcggcatctgcctcaacatcttcgacagcccggccaccgtcagatatcaccgccccgcctgccagtactcccgtgcggctccgatgcctaaggctggctcagcacgaggacgcgcggtcgccatggcctgcaagatggtcggaggaggaagcgacggctcgctggacctctgcgctagactgtgcatcattggggaagacgagaccgtcatcttccagacctacgtgaaacccacggcgcctgtcaccaactacaggtatgaggtgactggaataaggccggagtacctgagggacgcaatgccactgaagcttgcccagaggagggtccaggacatcctgtgcaacggggagccgctgtggaagatccggccgaggagctatggaagggcaagggtcctcgttggacatggcgtggaccaggaccttgagcgcctagggttggagtacccagcattcatgatcagggacactgcaaagtatccaccactgatgaaaaccagcaagctgagcaatcccctaaagtaccttacacaagcatatcttgggtatgatgtgcacactggcgttcaggatccgtacgaggactgcgtggcagcgatgagactatatatcaggatgagatcgcaagctcacccgagagactatgcctccggttcaggggaggtgcagaataactacccggcctggaggcagagggagctggagaggatgagcccagaagaactgctggcactttcaggatcagattactactgctggtgcctggacccctaaactgatgagctgaagagaacaaggcaggaccaatggtgctggttttctcatattccatccataataataatgattacgtgtgtctaattatctttggacttatgtatggtgggattgagtatcatatcggtgatctaga

SEQ ID NO: 193 - protein, 335 aa, Triticum aestivum
MDSRRESAETLRNKCSACFRQYNKMEHLVEHMKVSYHSVHEPKCGACRKHCRSFESLREHLIGPLPKAECARVFSARGCGICLNIFDSPAAARYHRQACQYSRAAPMPKGGAGGRAVAMACKMVGGGSDGSVDLCARVCLIGEDENVIFQTYVKPTAPVTNYRYEVTGIRPEYLRDAMPLKLVQRRIQDILCNGEPLWKIRPRSYGRARILVGHIVDHDLERLGLEYPAFMIRDTAKYPPLMKTSKLSNTLKYLTQAYLGYDVHTGIQDPYEDCVAAMRLYIRMRSQAHPRDYASGSGEVQNNYPAWRQREMERMSPEELLALSGSDYYCWCLDP

SEQ ID NO: 194 - DNA, 1246 bp, Triticum aestivum
  source 1..1246: mol_type = other DNA
tttttctcgtgaaggttccatctctgatctctcaacgaggctggcctataaataggcgttcccatactgctcatcctcgccaacctcgagatctgagagatcttgatcgacctgcaggaagaatctgtggagctcgatggacagcaggagggagtccgcggagaccctgaggaacaagtgctcggcgtgcttccggcagtacaacaagatggagcaccttgtggagcacatgaaggtgtcgtatcactcggtccacgagcccaagtgcggcgcctgcaggaagcactgccgctccttcgagtccctcagggagcacctcatcggtccgctgcccaaggcggaatgcgcgcgcgtcttcagcgcccggggctgcggcatctgcctcaacatcttcgatagccctgccgccgccagatatcaccgtcaagcctgccagtactcccgcgctgctccgatgccaaagggtggcgcaggtgggcgtgcggttgccatggcctgcaagatggtcggaggagggagcgacggctctgtggacctctgcgcaagagtgtgccttattggagaagatgagaacgtcatcttccagacctatgtaaaacctacagctccggtcacaaactacaggtatgaggttactgggataaggcccgagtacctgagggatgcaatgccactgaaacttgtgcagaggaggatccaggacatcctgtgcaacggggagccgctgtggaagatacggccgaggagctatggaagggcaaggatccttgttgggcatatcgtggaccatgacctcgagcgcctaggtttggagtacccagcattcatgatcagggacaccgcaaagtacccaccgctgatgaaaaccagcaagctgagcaataccctgaagtacctcacacaagcatatcttgggtatgatgtccatactggcattcaggatccatacgaggactgcgtcgcggcgatgaggctatatatcaggatgagatcacaagctcacccgagagactacgcctccggttcaggggaggtgcagaataactacccggcctggaggcagagggagatggagaggatgagcccagaagaactcctggcactttcaggatcagactactactgctggtgcctggacccctagactgatgatgagctaaagagaacaaggcagggctggccgactgatgttggtttggtcatattccatccgtagtaataccgactacgtatgtctaattatctt

SEQ ID NO: 195 - DNA, 1933 bp, Triticum aestivum
  source 1..1933: mol_type = genomic DNA
tttttctcgtgaaggttccatctctgatctctcaacgaggctggcctataaataggcgttcccatactgctcatcctcgccaacctcgagatctgagagatcttgatcgacctgcaggaagaatctgtggagctcgatggacagcaggagggagtccgcggagaccctgaggtaacaaaacgttgagaaacaccattttttcttggctaacttcgttgataaccccagtttaagtccactttcgatgcttgcctaactgaagcatgtctgtgtgtgtaccaggaacaagtgctcggcgtgcttccggcagtacaacaagatggagcaccttgtggagcacatgaaggtgtcgtatcactcggtccacgagcccaagtgcggcgcctgcaggaagcactgccgctccttcgagtccctcagggagcacctcatcggtaagctaccaaacacatatcgatctctagctgcaaacatctctagctatggcatcaacagcagctgaactgaacgccgctccttgtgatcttgatcttggaaatgaaggtccgctgcccaaggcggaatgcgcgcgcgtcttcagcgcccggggctgcggcatctgcctcaacatcttcgatagccctgccgccgccagatatcaccgtcaagcctgccagtactcccgcgctgctccggtaattcatgttctccattccgttcaatcgccaccatcgacctcttcttaacatgcatggatgctagagctcccggccaacttttcacagaaatgttggcgagagagcagaaatcagaatctgatgtctctcttctccctcacttcttttttctcagatgccaaagggtggcgcaggtgggcgtgcggttgccatggcctgcaagatggtcggaggagggagcgacggctctgtggacctctgcgcaagagtgtgccttattggagaagatgagaacgtcatcttccagacctatgtaaaacctacagctccggtcacaaactacaggtagctcaccttggaatccattaccagtactgcttactagctatacaaggatcaactagatggattgttttctgaagtgcaaaagatgaagctgaccatttggctcttcaggtatgaggttactgggataaggcccgagtacctgagggatgcaatgccactgaaacttgtgcagaggaggatccaggacatcctgtgcaacggggagccgctgtggaagatacggccgaggagctatggaagggcaaggatccttgttgggcatatcgtggaccatgacctcgagcgcctaggtttggagtacccagcattcatgatcaggtacagatcattgctcagtgagctatagtttgttcctgctatctcttccttaattgcctcgaaattttactattttcttaacataatttatccatggacgtgcagggacaccgcaaagtacccaccgctgatgaaaaccagcaagctgagcaataccctgaagtacctcacacaagcatatcttgggtatgtcacttgataactgagctataaaacaaacactctgaaccctttggtcattgcctaatcctcaagggattgcccttctatccggttgtaggtatgatgtccatactggcattcaggatccatacgaggactgcgtcgcggcgatgaggctatatatcaggatgagatcacaagctcacccgagagactacgcctccggttcaggggaggtgcagaataactacccggcctggaggcagagggagatggagaggatgagcccagaagaactcctggcactttcaggatcagactactactgctggtgcctggacccctagactgatgatgagctaaagagaacaaggcagggctggccgactgatgttggtttggtcatattccatccgtagtaataccgactacgtatgtctaattatctt

SEQ ID NO: 196 - DNA, 1780 bp, Triticum aestivum
  source 1..1780: mol_type = other DNA
tgtggagcgcgatggacagcagaagggagtccgcggagaccctgaggtaacaagacgttgagaaacgccatttttcttaacaaactgcaatagctcgaaggaagggtgagatagacgcttggcctaactgaagcatgtctgtgtgtgtaccaggaacaagtgctcggcgtgcttccggcagtacaacaagatggagcaccttgtggagcacatgaaggtgtcgtaccactcggtccacgagcccaagtgcggcgcctgcaggaagcactgccgctccttcgagtccctcagggagcacctcataggtaagctaccagcaaactccacgaccaccaaatctctagctgcatgcaaacatctctatagctatggcatcaacagcagctgaactgtgcacgctgggctcatgcatcttttatattctcccgtccgatctttgaagtatgtcctgacagtatatatgtcttgttgcctcttcatcttggcaatgaaggtccattgcccaaggccgaatgcgcgcgcgtcttcagcgcccggggctgtggcatctgcctcaacatctttgacagccccgccgccgccagatatcaccgtcacgcctgccaatactcccgcgctgctccggtaattagtgttctccactccgttcagtctccgccatggagctcttcatagcttggatgctagagctcccggccaactttttacaaaaatgttgctgggagagcagaaatcagaacctgatgtttctcttctccctctcttttgcgttctttttctcagatgccaaagggtggcgcaggtggacgcgcggttgccatggcctgtaagatggtcggaggagggagcgacggctccgtggacctctgcgcaagagtgtgccttattggagaagatgagaacgtcatcttccagacctatgtaaaacctacagctccggtcacaaactacaggtagctcaccttggaatccattaccagtactgcttactagctatacaaggatcaactagatggattgttttctgaagtgcaaaagatgaagctgaccatttggctcttcaggtatgaggttactgggataaggcccgagtacctgagggatgcaatgccactgaaacttgtgcagaggaggatccaggacatcctgtgcaacggggagccgctgtggaagatacggccgaggagctatggaagggcaaggatccttgttgggcatatcgtggaccatgacctcgagcgcctaggtttggactacccagcattcatgatcaggtacagatcattgctcagtgagctattgttcctaccatatcttccttaattgcctcgaaattttactattttcttaacactatttatccatggacatgcagggacaccgcaaagtacccaccgctgatgaaaaccagcaagctgagcaataccctgaagtacctcacacaagcatatcttgggtatgtcacttgataactgatctataaaacaaactctctgaaccctttggtcattgcctaatgctcaagggattgcccctctatcccgttataggtatgatgtccatactggcattcaggatccatacgaggactgcgtcgcggcgatgagactatatatcaggatgagatcacaagctcacccgagagactacgcctccggttcaggggaggtgcagaataactacccggcctggaggcagagggagatggagaggatgagcccagaagagctcctggcactttcaggatcagactactactgctggtgcctggacccctaga

SEQ ID NO: 197 - protein, 329 aa, Triticum aestivum
MDSRRENKCSACFRQYNKMEHLVEHMKVSYHSVHEPKCGACRKHCRSFESLREHLIGPLPKAECARVFSARGCGICLNIFDSPAAARYHRHACQYSRAAPMPKGGAGGRAVAMACKMVGGGSDGSVDLCARVCLIGEDENVIFQTYVKPTAPVTNYRYEVTGIRPEYLRDAMPLKLVQRRIQDILCNGEPLWKIRPRSYGRARILVGHIVDHDLERLGLDYPAFMIRDTAKYPPLMKTSKLSNTLKYLTQAYLGYDVHTGIQDPYEDCVAAMRLYIRMRSQAHPRDYASGSGEVQNNYPAWRQREMERMSPEELLALSGSDYYCWCLDP

SEQ ID NO: 198 - DNA, 1002 bp, Triticum aestivum
  source 1..1002: mol_type = other DNA
tgtggagcgcgatggacagcagaagggagaacaagtgctcggcgtgcttccggcagtacaacaagatggagcaccttgtggagcacatgaaggtgtcgtaccactcggtccacgagcccaagtgcggcgcctgcaggaagcactgccgctccttcgagtccctcagggagcacctcataggtccattgcccaaggccgaatgcgcgcgcgtcttcagcgcccggggctgtggcatctgcctcaacatctttgacagccccgccgccgccagatatcaccgtcacgcctgccaatactcccgcgctgctccgatgccaaagggtggcgcaggtggacgcgcggttgccatggcctgtaagatggtcggaggagggagcgacggctccgtggacctctgcgcaagagtgtgccttattggagaagatgagaacgtcatcttccagacctatgtaaaacctacagctccggtcacaaactacaggtatgaggttactgggataaggcccgagtacctgagggatgcaatgccactgaaacttgtgcagaggaggatccaggacatcctgtgcaacggggagccgctgtggaagatacggccgaggagctatggaagggcaaggatccttgttgggcatatcgtggaccatgacctcgagcgcctaggtttggactacccagcattcatgatcagggacaccgcaaagtacccaccgctgatgaaaaccagcaagctgagcaataccctgaagtacctcacacaagcatatcttgggtatgatgtccatactggcattcaggatccatacgaggactgcgtcgcggcgatgagactatatatcaggatgagatcacaagctcacccgagagactacgcctccggttcaggggaggtgcagaataactacccggcctggaggcagagggagatggagaggatgagcccagaagagctcctggcactttcaggatcagactactactgctggtgcctggacccctaga

SEQ ID NO: 199 - protein, 354 aa, Triticum aestivum
MLTSAPLWTVRSFVELSSTVRNKCAACYRQFNRMEHLVEHMRASHHSPHEPRCGVCGKHCRSLDALRDHLGFGASLPPKPACATAFAAKGCPLCLAVFPSSSSLRAHGPTCHHSRAPVPSRGAMPRMPVGGVVALGCKMVGGGSDGTLDLCGRVCVIDENETIVFENFVRPLLPVTHYRYETTGIRPEYLRDAPTVKMVQRQVEGILLNGEQPWKVRSSRGAARILVGHGLEHDLDALGMDYPAYLKRDTAEYPPLMKTSARLMSNSLRFLTQSCLGYDIQTGHQHPYEDCVAAMRLYKRMRAMTHGPRKNGGEGDACAAVAFPARRQRELERMSPEELLSMSKLDYHCWCLDD

SEQ ID NO: 200 - DNA, 1270 bp, Triticum aestivum
  source 1..1270: mol_type = other DNA
agccggctcaacttatccattcattaatcaaagcgtttgcttctgatcccttgatttggaaatcataattcctttgcatttggggtttgaattagtcaactgtttctataatccaatgcctttgcattgtttcttcctttggttatgaaccgatgctcacatcagctccgttatggaccgttagatcctttgttgaattatcatcgacggtccggaacaagtgcgcggcgtgctaccgccagttcaacaggatggagcacctggtggagcacatgcgcgcgtcgcaccactcgccgcacgagccgcgctgcggcgtctgcgggaagcactgccgctccctcgacgccctccgtgaccacctcggcttcggcgcctccctgcccccgaagcccgcctgcgccacggcctttgctgccaagggctgcccgctctgcctcgccgtcttccctagctccagctccctccgcgcccacggcccaacctgccaccactcccgcgctccggttccctcgaggggggctatgccgagaatgcccgtcggcggcgtggtggcgctggggtgcaagatggtgggcggcgggagcgacgggacgctggacctgtgcgggcgcgtctgcgtcatcgacgagaatgagaccatcgtcttcgagaactttgtgaggccgctcctcccggtgacgcactaccggtacgagaccacggggatccgccccgagtacctgcgggacgcgccgacggtgaagatggtgcagcggcaggtggagggcatcctcctcaacggcgagcagccgtggaaggtccggtcctcgcgcggcgcggccaggatcctcgtcggccacggcctggagcacgatctcgacgcgctgggcatggactacccggcgtacctgaagcgggacacggcggaatatccgccgctgatgaagacgagcgccaggctgatgagcaactcgcttcggttcctcacacaaagctgcctcggctacgacatccagacgggccaccagcacccctacgaggactgcgtggcggccatgcggctgtacaagagaatgcgcgcgatgacgcacggcccgcggaagaacgggggcgaaggcgatgcgtgcgcggcggtggcattcccggcgcggaggcagcgggagctggagcgcatgtcgccggaggagctcctgagcatgtccaagctcgactatcactgctggtgcctcgacgactagcctcgacgactgcagctgcatctgcatgtccaacagtccaagcatgagccatg

SEQ ID NO: 201 - DNA, 2363 bp, Triticum aestivum
  source 1..2363: mol_type = genomic DNA
atgctcacatcagctccgttatggaccgttagatcctttgttgaattatcatcgacggtgtccttcgtatacaaaaacctcgagaagttctttccctaatacataatgccattggtaaatcatattctctgatttggccaaccatgctctgctttcgatagtttggccatgtttacaaaaaatatatcaacatcaacaacaccaaattttcattagacccgccgtaaaatataagaacagaagacacatttttttttcagtgaagaaaacatatgatacttttagcctcatgacatgccaaactgagcttgaacaagatccgtccagtatgccacggttgcgctcaccatgaaccttcagtttcgtgaatctattcgacgtcgatttgtagtcactgaagatagcaaaccagatgcgcagggccaggaccgtcctttgatccccgccgagaacgagatgacaacgtctccaaaagcaaagctagctccggagggtatgttcctaggatatccatggttggattcagggacctgtgcagctctccgcctctcctccatcgctaaagcaaagccaatgataggataatctttccatgtgtttgttcttgcctttttgttcaaaccgaatctgttgaccagggtatctgatctctccccccctctcttttcctttctacatacagcacctggtgtatcatgagggcgttctggtgtctatgttcttttctttgcatgggctggtgtctatgttcttgatgctccaagaaagatgaggacatcttgtggcctctgtactgtgcgctggtgaagaaggcaagtcgccatcaagaatcgaatgccatcggttttgcaggcagataaatagccgtccgtccgtgtgcacagattcttacaatccatccaaccagtctcaacctctgtttgctgcatactgcacagcttatttgcttaggaaaggtgaccgagtgatcatggatagctcttcagatgcccacaggtgcactcactggccactactctgttttagttgtcttgttatcacacattttgcagtcgaagaactctgctatacctaagctgcagtatgctcaaaagttttgtgagatcatgccaccataaattcagcacattttctttgtttctacattacgtgacaagttgagattgattcttaagaattttctaattaagctgctgcgtagtggactgcatgatatagaaaatgtaatagatgatgtcgctaagattgcactgtgcgttttgttgccacaatgcatgatcactcaggcagagacatacacctatgagtagagtagtaccagtgacgatggatgattcaattcgtcgcgtgcatgcagccggaacaagtgcgcggcgtgctaccgccagttcaacaggatggagcacctggtggagcacatgcgcgcgtcgcaccactcgccgcacgagccgcgctgcggcgtctgcgggaagcactgccgctccctcgacgccctccgtgaccacctcggcttcggcgcctccctgcccccgaagcccgcctgcgccacggcctttgctgccaagggctgcccgctctgcctcgccgtcttccctagctccagctccctccgcgcccacggcccaacctgccaccactcccgcgctccggttccctcgaggggggctatgccgagaatgcccgtcggcggcgtggtggcgctggggtgcaagatggtgggcggcgggagcgacgggacgctggacctgtgcgggcgcgtctgcgtcatcgacgagaatgagaccatcgtcttcgagaactttgtgaggccgctcctcccggtgacgcactaccggtacgagaccacggggatccgccccgagtacctgcgggacgcgccgacggtgaagatggtgcagcggcaggtggagggcatcctcctcaacggcgagcagccgtggaaggtccggtcctcgcgcggcgcggccaggatcctcgtcggccacggcctggagcacgatctcgacgcgctgggcatggactacccggcgtacctgaagcgggacacggcggaatatccgccgctgatgaagacgagcgccaggctgatgagcaactcgcttcggttcctcacacaaagctgcctcggctacgacatccagacgggccaccagcacccctacgaggactgcgtggcggccatgcggctgtacaagagaatgcgcgcgatgacgcacggcccgcggaagaacgggggcgaaggcgatgcgtgcgcggcggtggcattcccggcgcggaggcagcgggagctggagcgcatgtcgccggaggagctcctgagcatgtccaagctcgactatcactgctggtgcctcgacgactag

SEQ ID NO: 202 - protein, 334 aa, Triticum aestivum
MEHLVEHMRSSHHSHHEPRCGVCGKHCRSLDALRDHLGFGASLPSKPACAATFQAHGCPLCLAVFPTSAALRAHRPACKLSGAPHPSSVQSLTRTMSRVGARGGRGAVALGCKMVGGGSDGTLDVCARVCVVDEHEAILYESFVKPLIPVTHYRYETTGIRPEHLRDAPTVKQAMRRVQDILLNGEQSYYSSRGAARLLVGHGLEHDLDALGMDYPAHLRRDTAAYPPLMKTSARLMSNSLRYLTRSCLGYDIQTGGHHHPYDDCVAAMRLYKRMRAMSHLHLHGRPKDDDDESAVKAFPAWRQRELERMSPEELLAMSKPDYRCWCLDDDRRC

SEQ ID NO: 203 - DNA, 1234 bp, Triticum aestivum
  source 1..1234: mol_type = other DNA
ggtagccgtcacagttgcgcggcgtgctaccgtcagttcaaccggatggagcacctggtggagcacatgcggtcgtcgcaccactcccaccacgagccccgctgcggcgtctgcggcaagcactgccgctccctcgacgccctccgcgaccacctcggcttcggcgcctccctgccctccaagcccgcctgcgccgccaccttccaagcccacggctgcccgctctgcctcgccgtcttccccacctccgccgcccttcgcgcccaccgcccagcatgcaagctctccggcgccccccatccttcctcggtgcagagcctcacgaggactatgtcgagggtgggcgcgcgaggcggccgcggcgcggtggcgctggggtgcaagatggtgggcggcgggagcgacggcacgctggacgtgtgcgcgcgcgtctgcgtcgtcgacgagcacgaggccatcctctacgagagcttcgtgaagcccctcatcccggtcacgcactaccggtacgagaccacgggcatccggcccgagcacctgcgcgacgcgccgacggtgaagcaggcgatgaggcgggtccaggacatcctcctcaacggcgagcaatcttattactcctcccgcggcgcggcccggctcctcgtcggccacgggctggagcacgacctcgacgcgctcggcatggactacccggcgcacctcaggcgggacacggccgcgtacccgccgctgatgaagacgagcgccaggctcatgagcaactcgctccggtatctcacgcggagctgcctgggctatgacatacagaccggcggacaccatcacccctacgacgactgcgtggccgccatgcgcctctacaagaggatgcgcgccatgagtcacctgcacctgcacggccggcccaaggacgacgatgatgagtccgcggtcaaggccttcccggcgtggaggcagcgagagctggagcgcatgtcgccggaggagctcctggcgatgtccaagcccgactaccgatgttggtgcctcgacgacgaccgccgatgctgacggcagcctgctccctacgggattcgaatcttggctggcgcttttacttggtggaatggtggtgatgatgaaaagataaagagaaaataaaataccgcgtgcgtcggatggatagttgccgtagacgtgtggtggtcgaataaatcacagttttgctttgtgtgagaaaaaaaaaaaaaaacga

SEQ ID NO: 204 - protein, 336 aa, Oryza sativa
MDSRRESSETLRNKCAACYRQYNRMEHLVEHMKVSFHSAHEPRCGVCAKHCRSLESLREHLIGPLPKVECARVFAARGCSICLNLFDSAAAVRYHRASTCQFTRAAPMPRGSYGGRAVAMACKMVGGGSDGSLDICARVCLIGEDENVIFQTYVKPTTTVTNYRYEMTGIRPEYLRDAMPLKLVQRRIQDILCNGEPLWKIRPRSSGRARILVGHGLEHELERLGLEYPAFMIRDTAKYPPLMKTSKLSNSLKYLTQAYLGYDIHTGIQDPYEDCVAAMRLYIRMRSQAHPRDYASGSGETQNNYPAWRQRELERMSPEELLALSGSDYYCWCLDF

SEQ ID NO: 205 - DNA, 1011 bp, Oryza sativa
  source 1..1011: mol_type = other DNA
atggacagcaggagggagtcctcggagaccctgaggaacaaatgcgcggcgtgctacaggcagtacaaccggatggagcacctggtggagcacatgaaggtgtcgttccactccgcccacgagccccgctgcggcgtctgcgccaagcactgccgctccctcgagtccctccgcgagcacctcatcgggccgttgcccaaggtggagtgcgcgcgcgtgttcgcggcccgcggctgcagcatctgcctcaacctcttcgacagcgccgccgccgtcagataccaccgcgcctccacctgccagttcacccgcgccgccccgatgcccaggggtagctacggaggccgtgcggtggccatggcgtgtaagatggtcggaggaggaagcgatggctcgctcgacatctgcgcgagggtgtgcctgatcggagaggacgagaacgtcatcttccagacctatgtgaaacccaccacgaccgtcacaaactacaggtatgaaatgactgggataaggccggagtacttgagggacgcaatgccactgaagcttgtgcagaggaggatccaggacatcctgtgcaacggtgagccactatggaagatacggccaaggagctctgggagggcaaggatcctcgttggccatggcctggagcatgaacttgagcgcctgggactggagtacccggcattcatgatcagggatactgcaaagtacccaccactgatgaaaactagcaagctgagcaactccctaaagtaccttacacaggcatatcttgggtatgatatccacactggcattcaggatccctatgaagattgcgtggcagcgatgaggctgtacattaggatgagatcgcaagcccacccgagagactacgcctccggttcaggtgagacgcagaacaactacccagcctggaggcagagggagctagagaggatgagcccagaagaactcctggcactctcgggttcagattactactgttggtgcctggatttctga

SEQ ID NO: 206 - DNA, 2542 bp, Oryza sativa
  source 1..2542: mol_type = genomic DNA
attacgataaactgcaggcttattcctcagaatgcatgcagcagtgacgacaagacggtgattcccaggggtcattccttcttcctcgtgaaggttcttccatcctttcaacgtttgttgcctctataaatagcctctccatgttgcctaccgtcctcaccaacctagctaactagcgcccctcgaggtttcagggagacaactgatcgatcagaaaccttggtcgaccgatcagtaagagcaactagagacagaaaccttaattctcgatcagcaggagttgtagtagtgctatatatgatggacagcaggagggagtcctcggagaccctgaggtaagatggtcacaaactgaatgccattactacagtagtattgcaagatgagctgagcatgcaagactggtgtgtgatgaactagctaattaatcaagctttaatcatgcatggtagtacgttcttctcgtgctctaaacatcgagctagatatataggacccttttttttcttgtcctagctagttccattcaataccttgaatatgcatgtatatatgatactacatattctgcgcacgaatgaatgagtaccttttcaactttcttatcccctattgccggtgcaaagaatcagaatttcataaatgcgtgcatagtgcctcgctcgcgatattctaaagacgcgatcgaactcaatcgatgaatgaaaatgatgatctcgcaggaacaaatgcgcggcgtgctacaggcagtacaaccggatggagcacctggtggagcacatgaaggtgtcgttccactccgcccacgagccccgctgcggcgtctgcgccaagcactgccgctccctcgagtccctccgcgagcacctcatcggtgagtacacaagtagccgtttttaatttgctcggttgatgcaacgagctagtttttgtggagttttcgcgtggtatctgacggtttctcgcgtacgccgtgcgcatgcagggccgttgcccaaggtggagtgcgcgcgcgtgttcgcggcccgcggctgcagcatctgcctcaacctcttcgacagcgccgccgccgtcagataccaccgcgcctccacctgccagttcacccgcgccgccccggtatgtaatcccctctcacctcagttacactgcgcatgctagtttgcaaggcttgttgctgaatttgcccgtggttttcttgcgtttgcatgcagatgcccaggggtagctacggaggccgtgcggtggccatggcgtgtaagatggtcggaggaggaagcgatggctcgctcgacatctgcgcgagggtgtgcctgatcggagaggacgagaacgtcatcttccagacctatgtgaaacccaccacgaccgtcacaaactacaggtaaaatatataggagatgatccattattttattactgatgatgtttctgagtgttagctagtagtacaatttttagctgtcattgttcgcatgtgtagatctatcggaccagaaaagcagaaaagacataatggaaaaccgagcaataaacatactgctatagaaactagcagtagaaattaaaggcatagatcgatggatagttttatgagatgatgaatgaggggatgatttatgatgtttctgttcaggtatgaaatgactgggataaggccggagtacttgagggacgcaatgccactgaagcttgtgcagaggaggatccaggacatcctgtgcaacggtgagccactatggaagatacggccaaggagctctgggagggcaaggatcctcgttggccatggcctggagcatgaacttgagcgcctgggactggagtacccggcattcatgatcaggtcagcagcacaaggcaaattaatttgctgcaaattagaccttgccagtttctcccttgctgacacaatttatctctgcatttttttcagggatactgcaaagtacccaccactgatgaaaactagcaagctgagcaactccctaaagtaccttacacaggcatatcttgggtatgcaaacttgctaagtcagctgtacaatctctatagactcttagactttgcattattaatgttgaagatactatccttgaatccctattgcaggtatgatatccacactggcattcaggatccctatgaagattgcgtggcagcgatgaggctgtacattaggatgagatcgcaagcccacccgagagactacgcctccggttcaggtgagacgcagaacaactacccagcctggaggcagagggagctagagaggatgagcccagaagaactcctggcactctcgggttcagattactactgttggtgcctggatttctgaaggctgaactgatcggttgaagagaataaggaagagccaacattgatggtttattcatgtttcgtccaaatctctatatatttataagtatatcttgggacttgattatagtggaattgactataatgtataaagttatcctatgtaatgctatcatataatattggtgagttagagttgtatggagtgatgttaaacag

SEQ ID NO: 207 - protein, 334 aa, Oryza sativa
MDNSSDSQRRKRCAACYREFNKKEHLVEHMRTSLHSAHDPRCGVCGKHCRSLDALRDHLTGALPKPECAAAFASRGCPLCLHVVLPPTAAAHSCPAAAPPLGGVLALGCKMVGAGSDGSLDVCARVCVVDEQERVVLDTFVKPHIPVTHYRYDTTGIRPEHLRDAMTPKQAARRVQELLLNGEPAWKARSSRGRARILVGHGLDHDLESLGMDYPEYLKRDTARYPALMKTSNSRLSNSLKYLTLAYLGYHIQIAGRHHHPYDDCVAALRLYRRMRGARPHTCRDAGVGPHAPPPTPAEAFPAWRQRELERMSPEELLQLSTSDYYCWCLDATD

SEQ ID NO: 208 - DNA, 1005 bp, Oryza sativa
  source 1..1005: mol_type = other DNA
atggataattcttcagattctcagaggaggaagaggtgcgcggcgtgctatagggagttcaacaagaaggagcacctggtggagcacatgcggacgtcgctgcattcggcgcacgaccctcgctgcggcgtctgcggcaagcactgccgctccctcgacgccctccgcgaccacctcaccggcgccctccccaagccggagtgcgccgccgccttcgcctcccgcggctgccccctctgcctccacgtagtcctcccgcccaccgccgccgcccactcctgccccgcggccgcgccaccgctcggcggcgtcctcgccctggggtgcaagatggtgggcgccggcagcgacgggtccctggacgtgtgcgcccgcgtgtgcgtggtggacgagcaggagcgcgtggtgttggacaccttcgtcaagccgcacatccccgtcacgcactaccgctacgacaccaccggcatccgccccgagcacctgcgcgacgccatgacgcccaagcaggcggcgcgccgggtgcaggagctgctgctcaacggcgagccggcgtggaaggcgcggagcagccgcgggagggcccggatcctggtcggccacggcctggaccacgacctcgagtcgctgggcatggactacccggagtacctgaagcgggacacggcgaggtacccggcgctgatgaagacgagcaacagccgcctcagcaactcgctcaagtacctcaccctcgcctacctcggctaccacatccagatcgccggccgccaccaccacccctacgacgactgcgtcgccgcgctgcgcctctaccgccggatgcgtggcgcgcggccgcacacctgcagggacgccggcgtggggccgcacgcgccgccgccaacgccggcggaggcgttcccggcgtggaggcagcgggagctggagcgcatgtcgccggaggagctcctccagctgtccacctcggactactactgctggtgcctcgacgccaccgactaa

SEQ ID NO: 209 - DNA, 1619 bp, Oryza sativa
  source 1..1619: mol_type = genomic DNA
ttctactccatcggttcgaaaatataaaccattttgaagaaatgtgacacattatatactatgaatctggatacggagcctgtccagattcgtagtagaggatatgtcaaaaacggagggagtatctagcagggacatcacattcgatcgacaacactgtcaagaatcaaattctgtccgttggatttgcgtataaataggcatcggaaacaagtgcagatagcaatcaccaatcagcacaacaactaactacaccagtggccactcacctgcactcctgcagtagtcttcagatcgagaatggataattcttcagattctcagaggtattagccaatgttctaactacattctgattatatatatatatatatatatgaagaaaagaaagaaagaaagaaagaaagaaattgattaagttaaataaaaaatatgaataggaggaagaggtgcgcggcgtgctatagggagttcaacaagaaggagcacctggtggagcacatgcggacgtcgctgcattcggcgcacgaccctcgctgcggcgtctgcggcaagcactgccgctccctcgacgccctccgcgaccacctcaccggcgccctccccaagccggagtgcgccgccgccttcgcctcccgcggctgccccctctgcctccacgtagtcctcccgcccaccgccgccgcccactcctgccccgcggccgcgccaccgctcggcggcgtcctcgccctggggtgcaagatggtgggcgccggcagcgacgggtccctggacgtgtgcgcccgcgtgtgcgtggtggacgagcaggagcgcgtggtgttggacaccttcgtcaagccgcacatccccgtcacgcactaccgctacgacaccaccggcatccgccccgagcacctgcgcgacgccatgacgcccaagcaggcggcgcgccgggtgcaggagctgctgctcaacggcgagccggcgtggaaggcgcggagcagccgcgggagggcccggatcctggtcggccacggcctggaccacgacctcgagtcgctgggcatggactacccggagtacctgaagcgggacacggcgaggtacccggcgctgatgaagacgagcaacagccgcctcagcaactcgctcaagtacctcaccctcgcctacctcggctaccacatccagatcgccggccgccaccaccacccctacgacgactgcgtcgccgcgctgcgcctctaccgccggatgcgtggcgcgcggccgcacacctgcagggacgccggcgtggggccgcacgcgccgccgccaacgccggcggaggcgttcccggcgtggaggcagcgggagctggagcgcatgtcgccggaggagctcctccagctgtccacctcggactactactgctggtgcctcgacgccaccgactaataacgaattattactcccacgtactacctaaactacttactcagtataattatgactaattatgctgctgcgtgtccgtctttattagtactccactccgtatgtacgaatcaggatgtaagaccatcgatctgatagagacagtaccgtcacagtacgtgtgacaaccacaggttgcaaaattttttaaaaaaggtttt

SEQ ID NO: 210 - DNA, 1172 bp, Arabidopsis thaliana
  source 1..1172: mol_type = other DNA
tgcatgtgacatttagaccttatcggaattaatttgtagaattattaattaagatgttgattagttcaaacaaaaattttatattaaaaaatgtaaacgaatattttgtatgttcagtgaaagtaaaacaaattaaattaacaagaaacttatagaagaaaatttttactatttaagagaaagaaaaaaatctatcatttaatctgagtcctaaaaactgttatacttaacagttaacgcatgatttgatggaggagccatagatgcaattcaatcaaactgaaatttctgcaagaatctcaaacacggagatctcaaagtttgaaagaaaatttatttcttcgactcaaaacaaacttacgaaatttaggtagaacttatatacattatattgtaattttttgtaacaaaatgtttttattattattatagaattttactggttaaattaaaaatgaatagaaaaggtgaattaagaggagagaggaggtaaacattttcttctattttttcatattttcaggataaattattgtaaaagtttacaagatttccatttgactagtgtaaatgaggaatattctctagtaagatcattatttcatctacttcttttatcttctaccagtagaggaataaacaatatttagctcctttgtaaatacaaattaattttccttcttgacatcattcaattttaattttacgtataaaataaaagatcatacctattagaacgattaaggagaaatacaattcgaatgagaaggatgtgccgtttgttataataaacagccacacgacgtaaacgtaaaatgaccacatgatgggccaatagacatggaccgactactaataatagtaagttacattttaggatggaataaatatcataccgacatcagttttgaaagaaaagggaaaaaaagaaaaaataaataaaagatatactaccgacatgagttccaaaaagcaaaaaaaaagatcaagccgacacagacacgcgtagagagcaaaatgactttgacgtcacaccacgaaaacagacgcttcatacgtgtccctttatctctctcagtctctctataaacttagtgagaccctcctctgttttactcacaaatatgcaaactagaaaacaatcatcaggaataaagggtttgattacttct

SEQ ID NO: 211 - protein, 351 aa, Gossypium hirsutum
MECADNPRNKCAACYRQFNRMEHLADHMRTSFHSVHEPTCGVCKKHCRSFESLREHLIGPLPKQECRNVFNIRGCKFCLAILDSPYALRVHQDRCQLSGVSHGISAYMANLGLRDSLTIDNGYSRGPQVVALACKTVGGGSDRSLDLCARVCIIDENENIIFHTYVKPSIPVTNYRYETTGIRPEHLRDAMPLRQVQRKVQDFLCNGEPTWKIRSPKGGKARILVGHGLDHDLDKMQVEYPPIMIRDTAKYPPLMKTSKLSNSLKYLTQAYLGYDIQNGIQDPYEDCVATMRLYVRMRRQVHRRQDYPLASDPQNRNNFASWRQNELERMSPEEMLAISRSDYYCWCLDSA

SEQ ID NO: 212 - DNA, 1129 bp, Gossypium hirsutum
  source 1..1129: mol_type = other DNA
taataatatatacttcacctatatttcatcactaaaaccagctatggagtgtgcagataacccaaggaacaaatgtgcagcttgctatagacagttcaataggatggaacatttggttgatcatatgagaacttcgtttcattcagttcatgaacctacttgtggtgtttgtaaaaagcactgccgatcctttgaatctctaagggaacatctaataggtccattgcccaaacaagaatgcaggaacgtgttcaacatccgaggctgcaagttttgtttagccattctcgatagcccttatgctcttagggttcatcaagacagatgccagctctctggagtgagccatgggatatcagcttacatggctaacttgggtcttagagatagcttaacaatcgacaatggttattcaagaggcccacaagttgttgcacttgcatgcaaaactgttggtggtggaagcgataggtcattggatctttgtgcaagggtttgcatcattgatgaaaatgagaatataatcttccatacttatgttaaaccttctattccagttacaaactataggtacgaaacaacaggcattcgaccagaacatttgagggatgcaatgccattgagacaagttcaaagaaaggttcaagatttcctttgcaatggagaaccaacgtggaaaattcgatcacctaaaggtggaaaagctaggattcttgtagggcatggtcttgatcatgacctagataaaatgcaagtcgaatatccaccaattatgataagggatactgcaaaatatcctcccttgatgaaaacaagcaaacttagcaactcactcaagtacttaactcaagcatatttggggtatgacattcaaaatggcattcaagatccttatgaggattgtgttgcaacaatgaggctttacgttaggatgaggagacaagttcataggagacaagactatccgttggcttccgaccctcaaaaccggaacaacttcgcatcgtggaggcaaaacgagctcgagaggatgtcccctgaagaaatgttggcaatctcaaggtctgattactactgttggtgcttggattctgcgtaaaaacactgagaaatgccactatttcatgct

SEQ ID NO: 213 - DNA, 2549 bp, Gossypium hirsutum
  source 1..2549: mol_type = genomic DNA
taataatatatacttcacctatatttcatcactaaaaccagctatggagtgtgcagataacccaaggtatgtctcaatctcaaccctagacacatgcatatgaaacccaacaatgtagtaattttgttgatgcaatgatcgaacaaggccgagattatgatggtattggtcggttcaccccatttgagatgggtcggagagccagttgttccggtaatagataatggaggaagtaagctctctcatggagagctatgaagaaagatggagaagagaagagaggaaaaagtcccttctgctgtttccttgtcccctcttttttcgttttccgtaggctttggtaataatggtctaatacttaggttgtcatagtattacgaggatgtgaccggagatttgatatgtataataattttatatatgtataacaagtttcaatgattaatgttgtaatgcaggaacaaatgtgcagcttgctatagacagttcaataggatggaacatttggctgatcatatgagaacttcgtttcattcagttcatgaacctacttgtggtgtttgtaaaaagcactgccgatcctttgaatctctaagggaacatctaataggtaactaattcaattcatttgtaatatatatatatatatatatgtcacagattcttgaaaactatataaatttgttaataaatacaggtccattgcccaaacaagaatgcaggaacgtgttcaacatccgaggctgcaagttttgtttagccattctcgatagcccttatgctcttagggttcatcaagacagatgccagctctctggagtgagccatgtattaattcaagtcaaattatctttatatacgaacatttatacgtaggtaaaagtatcataaaggtctctgtactaaaagttggattgcgtttgttccctctactcaaaaaataagcaaattggtacttatacataagatcaaatagtaaattagtcattctgttgaaaatttcatctatttctactgttaaaaaatgatctctgttgaaaatttcatctatttctactgttaaaaaatgatctctatacgtcagaatgaagtacatgtggcacgccatgtagaatcgtctagttattctatcagtcttgtcaatttttaacagtagaattagacaaaatttttaatagaaaaaactagtttgctttttgatctaatgtatagggattaatttacccccttttctatagtaaaggagggcaaaatgcaatctaactcttaatgcaggagactccatgataattttattatatgtatatttataatggcactttttttcccatattgaaattgatttaaaatgtgggttttacttgtaataggggatatcagcttacatggctaacttgggtcttagagatagcttaacaatcgacaatggttattcaagaggcccacaagttgttgcacttgcatgcaaaactgttggtggtggaagcgataggtcattggatctttgtgcaagggtttgcatcattgatgaaaatgagaatataatcttccatacttatgttaaaccttctattccagttacaaactataggtatgcccataggataaatccgagtaatccctaatcttttcatgttcaacatatattcaaacttggtccgacacttgccttagtctgagtaacataggttccttgtttgaattactttcaggtacgaaacaacaggcattcgaccagaacatttgagggatgcaatgccattgagacaagttcaaagaaaggttcaagatttcctttgcaatggagaaccaacgtggaaaattcgatcacctaaaggtggaaaagctaggattcttgtagggcatggtcttgatcatgacctagataaaatgcaagtcgaatatccaccaattatgataaggtaaaagattaaggatgccatatatatatatataacatacattcaaaaggaatatatatgagtcaaactacaatcttttttcaatacagcttgcaggttttgtattattcgaactcttcagttttcttaaagtattcatgttcgatatttgtttacagggatactgcaaaatatcctcccttgatgaaaacaagcaaacttagcaactcactcaagtacttaactcaagcatatttggggtaagtatctatagatcatccatttctcccctatacgatcggtatccgatcgatgatcgttaacgagagagtgatgcatcatgttgggtgtgaattaggtatgacattcaaaatggcattcaagatccttatgaggattgtgttgcaacaatgaggctttacgttaggatgaggagacaagttcataggagacaagactatccgttggcttccgaccctcaaaaccggaacaacttcgcatcgtggaggcaaaacgagctcgagaggatgtcccctgaagaaatgttggcaatctcaaggtctgattactactgttggtgcttggattctgcgtaaaaacactgagaaatgccactatttcattctcctccccccccccaattacttg

SEQ ID NO: 214 - protein, 340 aa, Gossypium hirsutum
MECAGNPRNKCAACYRQFNRMEHLVEHMRTSFHSAHETTCGVCKKHSRSFESLRENLIGPLPKQECRNVFNIRGCKFCLAILDSPYALRVHQDRCQLSGVNHVLIQGISAYMANLGLRDSLTIDNGYSRGLQVVALACKTVGGGSDRSLDLCARVCIIDENENIIFHTYVKPPIPVTNYRYETTGIRPEHLRDAMPLRQVQRKVQDFLCNGEPTWKIRSPKGGKARILVGHGLDHDLDKMQVEYPPIMIRDTAKYPPLMKTSKLSNSLKYLTQAYLGYDIQNGIQDLYEDCVATMRLYVRMRRQIHRRQDYPLASDPQNRNNFASWRQNELERMSPVLFQ

SEQ ID NO: 215 - DNA, 1023 bp, Gossypium hirsutum
  source 1..1023: mol_type = other DNA
atggagtgtgcaggtaacccaaggaacaaatgtgcagcttgctatagacagttcaataggatggaacatttagttgaacatatgagaacttcgtttcattcagctcatgaaactacttgtggtgtttgtaaaaagcacagccgatcctttgaatctctaagggaaaatctaataggtccattgcccaaacaagaatgcaggaacgtgttcaacatccgaggctgcaagttttgtttagccattctcgatagcccttatgctcttagggttcatcaagacagatgccagctctctggagtgaaccatgtattaattcaagggatatcagcttacatggctaacttgggtcttagagatagcttaacaatcgacaatggttattcaagaggcctacaagttgttgcacttgcatgcaaaactgttggtggtggaagcgataggtcattggatctttgtgcaagggtttgcatcattgatgaaaatgagaatataatcttccatacttatgttaaacctcctattccagtcacaaactataggtacgaaacaacaggcattcgaccagaacatttgagggacgcaatgccattgagacaagttcaaagaaaggttcaagatttcctttgcaatggagaaccaacgtggaaaattcgatcacctaaaggtggaaaagctaggattcttgtagggcatggtcttgatcatgacctagataaaatgcaagtcgaatatccaccaattatgataagggatactgcaaaatatcctcccttgatgaaaacaagcaaacttagcaactcactcaaatacttaactcaagcatatttggggtatgacattcaaaatggcattcaagatctttatgaggattgtgttgcaacaatgaggctttacgttaggatgaggagacaaattcataggagacaagactatccgttggcttccgaccctcaaaaccggaacaacttcgcgtcgtggaggcaaaacgagctcgagaggatgtcccctgtgttgttccaatag

SEQ ID NO: 216 - DNA, 2324 bp, Gossypium hirsutum
  source 1..2324: mol_type = genomic DNA
atggagtgtgcaggtaacccaaggtatgtatatgaaacccaacaattttgttgatgcaatgatcgaacaaggcggagattatgatggtattggtcggttcaccccatttgagatgggtcggagagccagttgttctggtaatagataatggaggaagtaagctctctcatggagagttatggagaaagatggagaagagaagagaggaaaaagtcccttctgctgtttccttgtcccctcttttttttccgtaggctttggaaataatggtctaatatacttaggttgtcatagagttacgaggatgtgaccggagatttgatatgtataataattttatatatgtataacaagtttcaataattaatgttgtaatgcaggaacaaatgtgcagcttgctatagacagttcaataggatggaacatttagttgaacatatgagaacttcgtttcattcagctcatgaaactacttgtggtgtttgtaaaaagcacagccgatcctttgaatctctaagggaaaatctaataggtaactaattcaattcatttgtaatatatatatatatgtcacggattcttgaaaactatataaatttgttaataaatacaggtccattgcccaaacaagaatgcaggaacgtgttcaacatccgaggctgcaagttttgtttagccattctcgatagcccttatgctcttagggttcatcaagacagatgccagctctctggagtgaaccatgtattaattcaagtcaatttgtctttataaacatacatgtatccgtaggtaaaagtatcataaatgtctctgtactaaaagttggattgcatttattccctctactcaaaaaacgagcaaattagcacttatacataagatcaaagagaaaactagtccttctgttaaaaatttcatccatttctactgttaaaaaatgatctctatacgtcagaatgaagtacacgtggcacaccatgtagaattgtctagttattttgtcagtcacgtcaatttttgatagtagaattggataaaatttttaatagaaaagattagtttgctttttgatctaatgtatatggaccaatttacccccttttctttagtaaagaaggacaaaatgtaatttaactcttagtgcaggagactccatgatacttttattatatgtatatttataatggcacattttttcccatattgaaattgatttaaaatgtgggttttacttgtaataggggatatcagcttacatggctaacttgggtcttagagatagcttaacaatcgacaatggttattcaagaggcctacaagttgttgcacttgcatgcaaaactgttggtggtggaagcgataggtcattggatctttgtgcaagggtttgcatcattgatgaaaatgagaatataatcttccatacttatgttaaacctcctattccagtcacaaactataggtatgcccataggataaatccgagtaatccctaatcttttcatgttcaacatatattcaaacttggtccgacacttgccttagtctgagtaacatgggttccttgtttgaattactttcaggtacgaaacaacaggcattcgaccagaacatttgagggacgcaatgccattgagacaagttcaaagaaaggttcaagatttcctttgcaatggagaaccaacgtggaaaattcgatcacctaaaggtggaaaagctaggattcttgtagggcatggtcttgatcatgacctagataaaatgcaagtcgaatatccaccaattatgataaggtaaaagtttaaggatgctatatatatatataacatacattcaaaaggaatatatataagtcaaactacaatcttttttcaatacagcttgcaggttttgtattattcgaactcttcagttttcttaaagtattcatgttcgatatttgtttacagggatactgcaaaatatcctcccttgatgaaaacaagcaaacttagcaactcactcaaatacttaactcaagcatatttggggtaagtatctatagatcaaccatttctcccctatacgatcggtatccgatcgatgatcgttaacgagagagtgatgcatcatgttgggtgtgaattaggtatgacattcaaaatggcattcaagatctttatgaggattgtgttgcaacaatgaggctttacgttaggatgaggagacaaattcataggagacaagactatccgttggcttccgaccctcaaaaccggaacaacttcgcgtcgtggaggcaaaacgagctcgagaggatgtcccctgtgttgttccaatag

SEQ ID NO: 217 - protein, 381 aa, Gossypium hirsutum
MECADNPRNKCAACYRQFNRMEHLVDHMRTLFHSVHEPTCGVCKKHCRSFESLREHLIGPLPKQECRNAFNIRGCKFCLAILDSPYALRGISAYMANLGLRDSLTIDNGYSRGPQVVALACKTVGGGSDRSLDLCARVCIIDEKENIIFHTYVKPPIPVTNYRYETTGIRPEHLRDAMPLRQVQRKVQDFLCNGEPTWKIRSPKGGKARILVGHGLDHDLDKMQVEYPPIMIRDTAKYPPLMKTSKLSNSLKYLTQAYLGYDIQNGIQDPYEDCVATMRLYETRLPVGFRPSNRNNFASWRQNELERMSPEEMLAISSYLSNRHFNKCFGFNQVQFEMKTEFEYERKQNEIEKICGSVEATCAPQYTVLPHMVSFSRCQIE

SEQ ID NO: 218 - DNA, 1146 bp, Gossypium hirsutum
  source 1..1146: mol_type = other DNA
atggagtgtgcagataacccaaggaacaaatgtgcagcttgctatagacagttcaataggatggaacatttggttgatcatatgagaactttgtttcattcagttcatgaacctacttgtggtgtttgtaaaaagcactgccgatcctttgaatctctaagggaacatctaataggtccattgcccaaacaagaatgcaggaacgcgttcaacatccgaggctgcaagttttgtttagccattctcgatagcccttatgctcttagggggatatcagcttacatggctaacttggggcttagagatagcttaacaatcgacaatggttattcaagaggcccacaagttgttgcacttgcatgcaaaactgttggtggtggaagcgataggtcattggatctttgtgcaagggtttgcatcattgatgaaaaggagaatataatcttccatacttatgttaaacctcctattccagtcacaaactataggtacgaaacaacaggcattcgaccagaacatttaagggatgcaatgccattgagacaagttcaaagaaaggttcaagatttcctttgcaatggagaaccaacgtggaaaattcgatcacctaaaggtggaaaagctaggattcttgtagggcatggtcttgatcatgacctagataaaatgcaagtcgaatatccaccaataatgataagggatactgcaaaatatcctcccttgatgaaaacaagcaaacttagcaactcactcaagtacttaactcaagcatatttggggtatgacattcaaaatggcattcaagatccttatgaggattgtgttgcaacaatgaggctttacgagacaagactacccgttggcttccgaccctcaaaccggaacaacttcgcgtcgtggaggcaaaacgagctcgagaggatgtcccctgaagaaatgttggcaatctcaagttatttaagtaataggcattttaataagtgctttggctttaatcaggtccaatttgaaatgaagaccgagtttgaatacgagcgaaaacaaaatgagatagaaaaaatatgcgggagtgtcgaagcaacatgtgcgccacagtacactgttctgccgcatatggtttcgtttagtcgctgccaaattgaatga

SEQ ID NO: 219 - DNA, 3597 bp, Gossypium hirsutum
  source 1..3597: mol_type = genomic DNA
atggagtgtgcagataacccaaggtatgtctcaatctcaaccctagacatatgtatatgaaacccaacaatgtagtaattttgttgatgcaatgatcgaacaaggcggagattatgatggtattggtcggttcaccccatttgagatgggtcggagagccggttgttctggtaatagataatggaggaagtaagctctctcatggagagttatggagaaagatggagaagagaagagaggaaaaagtcccttctgctgtttccttgtcccctcttttttttcccgtaggctttggtaataatggtctaatatacttaggttgtcatagagttacgaggatgtgaccggagatttgatatgtataataattttatatatgtatgacaagtttcaatgattaatgttgtaatgcaggaacaaatgtgcagcttgctatagacagttcaataggatggaacatttggttgatcatatgagaactttgtttcattcagttcatgaacctacttgtggtgtttgtaaaaagcactgccgatcctttgaatctctaagggaacatctaataggtaactaattcaattcatttgtaatatatatatgtcacggattcttgaaaactatataaatttgttaataaatacaggtccattgcccaaacaagaatgcaggaacgcgttcaacatccgaggctgcaagttttgtttagccattctcgatagcccttatgctcttagggttcatcaagacagatgccagctctctggagtgaaccatgtattaattcaagtcaaattgtctttatatacatacatatatacgtagataaaagtatcataaaggtcctatactaaaagttggattgtgtttattctctctactcaaaaatgagtaaattagtacttatatataagatcaaagagtaaactagtccttctgttaaaaatttcatacatttctactgttaaaaaatgatctctatacgtcagaataaagtacatgtggcacgtcatgtagaattgtctagttattctgtcagccacgtcaatttttaacagtaaaattggataaattttttaatagaaaagactagttttctttttgatctaatgtataggaaccaatttacccctttttctttagtaaaggagggcaaaatgtaatctaacttttagtgcaggagactccatgatacttctattgtatgtatatttataatggcactttttttcccatattgaaattgatttaaaatgtgggttttacttgtaataggggatatcagcttacatggctaacttggggcttagagatagcttaacaatcgacaatggttattcaagaggcccacaagttgttgcacttgcatgcaaaactgttggtggtggaagcgataggtcattggatctttgtgcaagggtttgcatcattgatgaaaaggagaatataatcttccatacttatgttaaacctcctattccagtcacaaactataggtatgcccataggataaatccgagtaatccctaatcttttcatgttcaacatatattcaaacttggtccgatacttgccttagtctgagtaacataggttccttgtttgaattactttcaggtacgaaacaacaggcattcgaccagaacatttaagggatgcaatgccattgagacaagttcaaagaaaggttcaagatttcctttgcaatggagaaccaacgtggaaaattcgatcacctaaaggtggaaaagctaggattcttgtagggcatggtcttgatcatgacctagataaaatgcaagtcgaatatccaccaataatgataaggtaaaagtttaaggatgccatatatatatataacatacattcaaaaggaatatatataagtcaaactacaatcttttttcaatacagcttgcaggttttgtattattcgaactcttcggttttcttaaagtattcatgttcgatatttgtttacagggatactgcaaaatatcctcccttgatgaaaacaagcaaacttagcaactcactcaagtacttaactcaagcatatttggggtaagtgtctatagatcatccatttctcccctatacgatcggtatccgatcgacgatcgttaacgagagagtgatgcatcatgttgggtgtgaattaggtatgacattcaaaatggcattcaagatccttatgaggattgtgttgcaacaatgaggctttacgttaggatgaggagacaagttcataggagacaagactacccgttggcttccgaccctcaaaccggaacaacttcgcgtcgtggaggcaaaacgagctcgagaggatgtcccctgaagaaatgttggcaatctcaaggtctgattactactgttggtgcttggattctgcgtaaagacactgagaaatgccactatttcattctcctccccccccccaattacttgttatagcaataagaaggaagtagttcattgttatttccctagtgtttatttgtactagtaaacaatttattggattatatatacatgtatgtatgctagtgaaatcatctaaataaatggaattataagagtattcatagagtaagtttagctcggttggtttatagactacagtcctctttcaaaaaaaaaaaaactgaaattccaaaataaacatgataaatacattaatagacacattaaaagtttaaaataactaataagaaagcatacaaacttaacaaaattaaactgaatgaataatcaaaatattatgaatttaacaattgaaataacattcaaatattaaatttcggttaatttgagtgaactgattatttttttataattatctgaactgaatgaagtttattctgttaaataatcaacctatagataccgtaaaaaattccaacaagaacacaaattcaacatatataaagagattatgaaatatgaatcgtcataacaatattatttcaattctctaataaatttgcaattttcagctgcctgtttatcttgggtttttctcccaggatgatgatcaatgttgggaaatgtggacaactttttcatatgttttagttgagagtttgatatttaccatgcatttggcaccatcttcacctcatggttaatattgattccctttttgtgaggaccactcgacacctacaacttcatctttgaatctcattggtttcaaatggaatcagatttccataaaagttcatcctctgatttttcttggctttcttgatcaaacaccaccatcaaagtcttcatcatataaatatatttgtacttttttcacttatgagtttttaagtaaatattatatttaattgcataattaggataaatttcataggttgcatcatatttatattttatgttgttttacttatttttagttatttaagtaataggcattttaataagtgctttggctttaatcaggtccaatttgaaatgaagaccgagtttgaatacgagcgaaaacaaaatgagatagaaaaaatatgcgggagtgtcgaagcaacatgtgcgccacagtacactgttctgccgcatatggtttcgtttagtcgctgccaaattgaatga

SEQ ID NO: 220 - protein, 351 aa, Gossypium raimondii
MECADNPRNKCAACYRQFNRMEHLVDHMRTSFHSVHEPTCGVCKKHCRSFESLREHLIGPLPKQECRNAFNIRGCKFCLAILDSPYALRVHQDRCQLSGVNHGISAYMANLGLRDSLTIDNGYSRGPEVVALACKTVGGGSDRSLDLCARVCIIDEKENIIFHTYVKPPIPVTNYRYETTGIRPEHLRDAMPLRQVQRKVQDFLCNGEPTWKIRSPKGGKARILVGHGLDHDLDKMQVEYPPKMIRDTAKYPPLMKTSKLSNSLKYLTQAYLGYDIQNGIQDPYEDCVATMRLYVRMRRQVHRRQDYPLASDPQNRNNFASWRQNELERMSPEEMLAISRSDYYCWCLDSA

SEQ ID NO: 221 - DNA, 1056 bp, Gossypium raimondii
  source 1..1056: mol_type = other DNA
atggagtgtgcagataacccaaggaacaaatgtgcagcttgctatagacagttcaataggatggaacatttggttgatcatatgagaacttcgtttcattcagttcatgaacctacttgtggtgtttgtaaaaagcactgccgatcctttgaatctctaagggaacatctaataggtccattgcccaaacaagaatgcaggaacgcgttcaacatccgaggctgcaagttttgtttagccattctcgatagcccttatgctcttagggttcatcaagacagatgccagctctctggagtgaaccatgggatatcagcttacatggctaacttggggcttagagatagcttaacaatcgacaatggttattcaagaggcccagaagttgttgcacttgcatgcaaaactgttggtggtggaagcgataggtcattggatctttgtgcaagggtttgcatcattgatgaaaaggagaatataatcttccatacttatgttaaacctcctattccagtcacaaactataggtacgaaacaacaggcattcgaccagaacatttaagggatgcaatgccattgagacaagttcaaagaaaggttcaagatttcctttgcaatggagaaccaacgtggaaaattcgatcacctaaaggtggaaaagctaggattcttgtagggcatggtcttgatcatgacctagataaaatgcaagtcgaatatccaccaaaaatgataagggatactgcaaaatatcctcccttgatgaaaacaagcaaacttagcaactcactcaagtacttaactcaagcatatttggggtatgacattcaaaatggcattcaagatccttatgaggattgtgttgcaacaatgaggctttacgttaggatgaggagacaagttcataggagacaagactacccgttggcttccgaccctcaaaaccggaacaacttcgcgtcgtggaggcaaaacgagctcgagaggatgtcccctgaagaaatgttggcaatctcaaggtctgattactactgttggtgcttggattctgcataa

SEQ ID NO: 222 - DNA, 2412 bp, Gossypium raimondii
  source 1..2412: mol_type = genomic DNA
atggagtgtgcagataacccaaggtatgtctcaatctcaaccctagacatatgtatatgaaacccaacaatgtagtaattttgttgatgcaatgatcgaacaaggcggagattatgatggtattggtcggttcaccccatttgagatgggtcggagagccggttgttctggtaatagataatggagaaagtaagctctctcatggagagttatggagaaagatggagaagagaagagaggaaaaagtcccttctgctgtttccttgtcccctcttttttttcccgtaggctttggtaataatggtctaatatacttaggttgtcatagagttacgaggatgtgaccggagatttgatacgtataataattttatatatgtatgacaagtttcaatgattaatgttgtaatgcaggaacaaatgtgcagcttgctatagacagttcaataggatggaacatttggttgatcatatgagaacttcgtttcattcagttcatgaacctacttgtggtgtttgtaaaaagcactgccgatcctttgaatctctaagggaacatctaataggtaactaattcaattcatttgtaatatatatacatatatatatatatatgtcacggattcttgaaaactatataaatttgttaataaatacaggtccattgcccaaacaagaatgcaggaacgcgttcaacatccgaggctgcaagttttgtttagccattctcgatagcccttatgctcttagggttcatcaagacagatgccagctctctggagtgaaccatgtattaattcaagtcaaattgtctttatatacatacatatatacgtaggtaaaagtatcataaaggtcctgtactaaaagttggattgtgtttattccctctactcaaaaaatgagcaaattagtacttatacataagaccaaagagtaaactagtccttctgttgaaaatttcatacatttctactgttaaaaaatgatctctatacgtcagaatgaagtacatgtggcacgtcatgtagaattgtctagttattctgtcagccacgtcaatttttaacagtagaattggataaatttttaatagaaaagactagttttctttttgatctaatgcatagggaccaatttacccccttttctttagtaaaggagggcaaaatgtaatctaacttttagtgcaggggactccatgatacttctatgtatatttataatggaactttttttcccatattgaaattgatttaaaatgtgggttttacttgtaataggggatatcagcttacatggctaacttggggcttagagatagcttaacaatcgacaatggttattcaagaggcccagaagttgttgcacttgcatgcaaaactgttggtggtggaagcgataggtcattggatctttgtgcaagggtttgcatcattgatgaaaaggagaatataatcttccatacttatgttaaacctcctattccagtcacaaactataggtatgcccataggataaatccgagtaatccctaatcttttcatgttcaacatatattcaaacttggtccgatacttgccttagtctgagtaacataggttccttgtttgaattactttcaggtacgaaacaacaggcattcgaccagaacatttaagggatgcaatgccattgagacaagttcaaagaaaggttcaagatttcctttgcaatggagaaccaacgtggaaaattcgatcacctaaaggtggaaaagctaggattcttgtagggcatggtcttgatcatgacctagataaaatgcaagtcgaatatccaccaaaaatgataaggtaaaagtttaaggatgccatatatatatatatataacatacattcaaaaggaatatatataagtcaaactacaatcttttttcaatacagcttgcaggttttgtattattcgaactcttcggttttcttaaagtattcatgttcgatatttgtttacagggatactgcaaaatatcctcccttgatgaaaacaagcaaacttagcaactcactcaagtacttaactcaagcatatttggggtaagtatctatagatcatccatttctcccctatacgatcggtatccgatcgatgatcgttaacgagagagtgatgcatcatgttgggtgtgaattaggtatgacattcaaaatggcattcaagatccttatgaggattgtgttgcaacaatgaggctttacgttaggatgaggagacaagttcataggagacaagactacccgttggcttccgaccctcaaaaccggaacaacttcgcgtcgtggaggcaaaacgagctcgagaggatgtcccctgaagaaatgttggcaatctcaaggtctgattactactgttggtgcttggattctgcataa

SEQ ID NO: 223 - protein, 351 aa, Gossypium raimondii
MECAGNPRNKCAACYRQFNRMEHLVEHMRTSFHSVHEPTCGVCKKHCRSFESLREHLIGPLPKQECRNVFNIRGCKFCLAILDSPYALRVHQDRCQLSGVNHGISAYMANLGLRDSLTIDNGYSRGPQVVALACKTVGGGSDRSLDLCARVCIIDENENIIFHTFVKPPIPVTNYRYETTGIRPEHLRDAMPLRQVQRKVQDFLCNGEPTWKIRSPKGGKARILVGHGLDHDLDKMQVEYPPIMIRDTAKYPPLMKTSKLSNSLKYLTQAYLGYDIQNGIQDPYEDCVATMRLYVRMRRQVHRRQDYPLASDPQNRNNFASWRQNELERMSPEEMLAISRSDYYCWCLDSA

SEQ ID NO: 224 - DNA, 1056 bp, Gossypium raimondii
  source 1..1056: mol_type = other DNA
atggagtgtgcaggtaacccaaggaacaaatgtgcagcttgctatagacagttcaataggatggaacatttagttgaacatatgagaacttcgtttcattcagttcatgaacctacttgtggtgtttgtaaaaagcactgccgatcctttgaatctctaagggaacatctaataggtccattgcccaaacaagaatgcaggaacgtgttcaacatccgaggctgcaagttttgtttagccattctcgatagcccttatgctcttagggttcatcaagacagatgccagctctctggagtgaaccatgggatatcagcttacatggctaacttgggtcttagagatagcttaacaatcgacaatggttattcaagaggcccacaagttgttgcacttgcatgcaaaactgttggtggtggaagcgataggtcattggatctttgtgcaagggtttgcatcattgatgaaaatgagaatataatcttccatacttttgttaaacctcctattccagtcacaaactataggtacgaaacaacaggcattcgaccagaacatttgagggacgcaatgccattgagacaagttcaaagaaaggttcaagatttcctttgcaatggagaaccaacgtggaaaattcgatcacctaaaggtggaaaagctaggattcttgtagggcatggtcttgatcatgacctagataaaatgcaagtcgaatatccaccaattatgataagggatactgcaaaatatcctcccttgatgaaaacaagcaaacttagcaactcactcaaatacttaactcaagcatatttggggtatgacattcaaaatggcattcaagatccttatgaggattgtgttgcaacaatgaggctttacgttaggatgaggagacaagttcataggagacaagactatccgttggcttccgaccctcaaaaccggaacaacttcgcgtcgtggaggcaaaacgagctcgagaggatgtcccctgaagaaatgttggcaatctcaaggtctgattactactgttggtgcttggattctgcgtaa

SEQ ID NO: 225 - DNA, 2384 bp, Gossypium raimondii
  source 1..2384: mol_type = genomic DNA
atggagtgtgcaggtaacccaaggtatgtatatgaaacccaacaatgtagtaattttgttgatgcaatgatcgaacaaggcggagattatgatggtattggtcggttcaccccatttgagatgggtcggagagccagttgttctggtaatagataatggaggaagtaagctctctcatggagagttatggagaaagatggagaagagaagagaggaaaaagtcccttctgctgtttccttgtcccctctttttttttccgtaggctttggaaataatggtctaatatacttaggttgtcatagagttacgaggatgtgaccggagatttgatatgtataataattttatatatgtataacaagtttcaatgattaatgttgtaatgcaggaacaaatgtgcagcttgctatagacagttcaataggatggaacatttagttgaacatatgagaacttcgtttcattcagttcatgaacctacttgtggtgtttgtaaaaagcactgccgatcctttgaatctctaagggaacatctaataggtaactaattcaattcatttgtaatatatatatatatatatatgtcacggattcttgaaaactatataaatttgttaataaatacaggtccattgcccaaacaagaatgcaggaacgtgttcaacatccgaggctgcaagttttgtttagccattctcgatagcccttatgctcttagggttcatcaagacagatgccagctctctggagtgaaccatgtattaattcaagtcaatttgtctttataaacatacatgtatccgtaggtaaaagtatcataaatgtctctatactaaaagttggattgcatttattccctctactcaaaaaacgagcaaattagcacttatacataagatcaaagagaaaactaatccttctgttaaaaatttcatccatttctacggttaaaaaatgatctctttacgtcagaatgaagtacacgtggcacaccatgtagaattgtctagttattttgtcagtcacgtcaatttttgatagtagagttggataaaatttttaatagaaaagactagtttgctttttgatctaatgtatatggaccaatttacccccttttctttagtaaagaaggacaaaatgtaatttaactcttagtgcaggagactccatgatacttttattatatgtatatttataatggcacattttttcccatgttgaaattgatttaaaatgtgggttttacttgtaataggggatatcagcttacatggctaacttgggtcttagagatagcttaacaatcgacaatggttattcaagaggcccacaagttgttgcacttgcatgcaaaactgttggtggtggaagcgataggtcattggatctttgtgcaagggtttgcatcattgatgaaaatgagaatataatcttccatacttttgttaaacctcctattccagtcacaaactataggtatgcccataggataaatccgagtaatccctaatcttttcatgttcaacatatattcaaacttggtccgacacttgccttagtctgagtaacatgggttccttgtttgaattactttcaggtacgaaacaacaggcattcgaccagaacatttgagggacgcaatgccattgagacaagttcaaagaaaggttcaagatttcctttgcaatggagaaccaacgtggaaaattcgatcacctaaaggtggaaaagctaggattcttgtagggcatggtcttgatcatgacctagataaaatgcaagtcgaatatccaccaattatgataaggtaaaagtttaaggatgctatatatatatataacatacattcaaaaggaatatatataagtcaaactacaatcttttttcaatacagcttgcaggttttgtattattcgaactcttcagttttcttaaagtattcatgttcgatatttgtttacagggatactgcaaaatatcctcccttgatgaaaacaagcaaacttagcaactcactcaaatacttaactcaagcatatttggggtaagtatctatagatcaaccatttctcccctatacgatcggtatccgatcgatgatcgttaacgagagagtgatgcatcatgttgggtgtgaattaggtatgacattcaaaatggcattcaagatccttatgaggattgtgttgcaacaatgaggctttacgttaggatgaggagacaagttcataggagacaagactatccgttggcttccgaccctcaaaaccggaacaacttcgcgtcgtggaggcaaaacgagctcgagaggatgtcccctgaagaaatgttggcaatctcaaggtctgattactactgttggtgcttggattctgcgtaa

SEQ ID NO: 226 - protein, 339 aa, Gossypium raimondii
KKCAACFREFNKMEHLVDHMRTSYHSLHEPTCVLCNKHCRSFDSLREHLIGPLPKQECNKLFKILGCKFCLSILESPHALKLHQHRCRFSGVNYGTMSRPANKSTTVVDNGFSSHVVALACQMVDGGGNNESMDGCARVCMVDEYENIIFHVYVKPPISVPNYRYENSGIGGEHLRDGMPLKQVQRRIEEFLCNGEAMWKIRSPKAGKARILVGHHLHPLLQSLHLQYPSFMIRDTAAYPPLMKTNKLSNSLKYLTQTYLGYDIQAGVQDPYEDCVATMRLYLRMRNQVHQREDYPQASDPRNRNNFAPSRQSELERMSPEAMLAISRSDYYCWCLDSM

SEQ ID NO: 227 - DNA, 1620 bp, Gossypium raimondii
  source 1..1620: mol_type = other DNA
gcattcggtattctttccatcttactccttcacacacacaccatcctatgcacatttatgtcacttcgactctttatttttctaatgggataaactagcatttagttcttgaatttgataaattttaccaatttgatccttgaatgttttttgtccacattagtctttgaatttgacaacttttcttaattttagtctatgcgattacgcggcactctgagagcgttgcattatcacatggagcaaaattgagaaaatttgtcaagttctagaactaatgtgaccacaacaaaattcaaggactttttttttttttaaatgtcaactttagagactaaatgttgttttgtcctatattaaatacattcatgtttaacaattagattcgatacatattgtttaattttcttttaaaaaaaagaagaaagacaacaaattaggttaaaactattgtaaattaaagccctcgaggtagtttacttttgttaaacaaacccatatacttttactttactcaaacaagtccctatcctttgatttgtagtttagcccttattttaataaaaaaatattaacatatggagtgtttggaagtgaaggaagaaatgcgcagcatgtttcagagagttcaacaaaatggagcatttggttgatcacatgagaacttcatatcattcacttcatgaacctacctgtgtactttgtaataaacactgcaggtcctttgattctctaagggaacatcttataggtcctttaccgaaacaagaatgcaataaattattcaaaatcctaggatgcaaattctgcttatcgattctcgaaagccctcacgctcttaagcttcaccaacaccgatgccgcttctccggagtaaattatggaacaatgtctcgaccggcgaataagtctactactgttgtggacaatgggttttcgtcgcatgtggttgcactggcttgccaaatggtggatggtggtgggaacaatgagtcaatggatggttgtgctagggtttgcatggttgacgaatacgagaatatcatcttccatgtttatgtgaaaccacctatttcagttccaaattataggtatgaaaacagtggcattggaggcgaacatttgagagatggaatgccattgaaacaagtgcaaagaaggatcgaagagtttctttgcaatggagaagcaatgtggaaaattcgatcacctaaagctggaaaagctaggattcttgtgggtcatcatcttcatcctcttcttcaatccctgcatttacaatatccatcatttatgataagggatactgcagcatatccacctttaatgaaaacaaacaaacttagcaactcactcaagtacttgactcaaacatatttgggatatgatatacaagctggcgttcaagacccttatgaagactgtgttgcaacaatgaggctttacctgaggatgaggaaccaagttcaccagagagaagactatccacaggcttctgaccctcgaaatcggaacaactttgcaccatcaaggcaaagcgagcttgagagaatgtctccggaagcaatgctggctatctcgaggtctgattactactgttggtgcttagattccatgtaa

SEQ ID NO: 228 - DNA, 2742 bp, Gossypium raimondii
  source 1..2742: mol_type = genomic DNA
aagaaatgcgcagcatgtttcagagagttcaacaaaatggagcatttggttgatcacatgagaacttcatatcattcacttcatgaacctacctgtgtactttgtaataaacactgcaggtcctttgattctctaagggaacatcttataggtatgtcttcaacactggttagtctattttgttttaatttttttggggtccttgagccgtgaaatctgttcacctcaatatctgaaaaagtttagataaaaatattagacttgaattaaaatatgagctatacttaagctccattatctaacactcaagcttaacctagttcaatctgttctcgattttaaaaatcagttaaactctgctattagtctttgtactttttgcgaaagttgtgaattttgtccttgtactttaaattgatcaattttagtccctttacttctaaaattttaggcttgacccaaacaataacagttaaatttgtttggttagattcaactactaatcaagtactatgcatacagtagtagcgttaatcaatattctctaattagatcattctatgtctctatactttttcaaaacttggaattttagtctccagacatgatagtcactaattcattaaccgcatttttagtgagtaatgtatggaaataataagctgacatagcattatatactcaacttaatgaacttaacaattattgtttagtgaaaactaaaattttaaaattcgaaaagtataagaactaaaaatactaaattaaaatacaaggactaatagtaaaatttaaccttataaatttaaaaaaatgaaagtatataaaaatactaaatattaaatataattttttttaaaattgatagatttaaattaatttgggttaatcattaacaaatatgaatgagtttagataaaattgatatttttatttcaaattagacctattcgaaatccaaactacccgcatatagtctcacctaaaatttgatagggttaagacaaaaatagtaggcatcaaaaaatgaacttggcattggtatgaatcttgatttcaatgcaagaggatctgagttcgagcatatatgatttaaaacctatgatttgataaattgtaggtcctttaccgaaacaagaatgcaataaattattcaaaatcctaggatgcaaattctgcttatcgattctcgaaagccctcacgctcttaagcttcaccaacaccgatgccgcttctccggagtaaattatgtattcatctaatttagctttgaaaaaaaattatttcaaactacaatgctgaaatttagcttaattaaaatgcagttttggtggacgtcttattacagggaacaatgtctcgaccggcgaataagtctactactgttgtggacaatgggttttcgtcgcatgtggttgcactggcttgccaaatggtggatggtggtgggaacaatgagtcaatggatggttgtgctagggtttgcatggttgacgaatacgagaatatcatcttccatgtttatgtgaaaccacctatttcagttccaaattataggtaccaaccacacaattcgtgatcttataaaattatgtcaattactatttacgtgtgatttttttatataatatattttagtttttttattaatttaaaattaaaatatttatttttattataatcaattaaagattaaataaaaaaaatttcaatcagccaacaaactcttgacctagtggctagaacattatgttgtaggcatgagaacttaaattttatcttcagagttttagttgcatatctcaatatcgctttgacccaaacggtactacactgaaactgtaaaataaataatgggtacaggacttacctttttaaaaatagtaaagttggaagtattttttttaactcaataataaaattgaatggaattcaatagaaatcaaattcaacattataatttaattgactttttattttctcgaatttgttagctctaatgtctaatgaaaggaaatataaaacaataattcacataattgaactacgtgttttttttaggtatgaaaacagtggcattggaggcgaacatttgagagatggaatgccattgaaacaagtgcaaagaaggatcgaagagtttctttgcaatggagaagcaatgtggaaaattcgatcacctaaagctggaaaagctaggattcttgtgggtcatcatcttcatcctcttcttcaatccctgcatttacaatatccatcatttatgataaggtaaagtttaccatcacattcattacaatatacaaaatttatatgatgtgattttattattgcctatagggatactgcagcatatccacctttaatgaaaacaaacaaacttagcaactcactcaagtacttgactcaaacatatttggggtaagtgtatatatattgtccctcaatccctatgatcatatcattgattgttgacccttgtgtatatatgtatatatatcagatatgatatacaagctggcgttcaagacccttatgaagactgtgttgcaacaatgaggctttacctgaggatgaggaaccaagttcaccagagagaagactatccacaggcttctgaccctcgaaatcggaacaactttgcaccatcaaggcaaagcgagcttgagagaatgtctccggaagcaatgctggctatctcgaggtctgattactactgttggtgcttagattccatgtaa

SEQ ID NO: 229 - protein, 335 aa, Hordeum vulgare
MDSRRESAETLRNKCSACFRQYNKMEHLVEHMKVSYHSVHEPKCGACRKHCRSFESLREHLIGPLPKAECARVFSARGCSICLNIFDSPATARYHRHTCQYSRAAPMPKGGAGGRAVAMACKMVGGGSDGSVDLCARVCLVGEDENIIFQTYVKPTAPVTNYRYEVTGIRPEYLRDAMPLKLVQRRIQDILCNGEPLWKIRPRSYGRARILVGHIVDHDLERLGLEYPAFMIRDTAKYPPLMKTTKLSNTLKYLAQAYLGYDVHTGIQDPYEDCVAAMRLYIRMRSQAHPRDYATGSGEVQNNYPAWRQRELERMSPEELLALSGSDYYCWCLDP

SEQ ID NO: 230 - DNA, 1244 bp, Hordeum vulgare
  source 1..1244: mol_type = other DNA
atttgagagatcttgatcgacctgcaggaagaatctccaggagcgcgatggacagcagaagggagtccgcggagaccttgaggaacaagtgctcggcctgcttccggcagtacaacaagatggagcaccttgtggagcacatgaaggtgtcgtaccactcggtccacgagcccaagtgcggcgcctgcaggaagcactgccgctccttcgagtccctcagggagcacctcatcgggccgttgcccaaggcggaatgtgcgcgtgtcttcagcgcccggggctgcagcatctgcctcaacatcttcgacagccccgccaccgccagatatcaccgtcacacctgccagtactcccgcgctgctccgatgccaaagggtggcgcaggtggacgcgcggtcgccatggcctgcaagatggtcgggggagggagcgacggatcggtggacctctgcgcgagagtgtgccttgttggagaagatgagaacatcatcttccagacctatgtaaaacccacggcgcccgtcacaaactacaggtatgaggtgactgggataaggcccgagtacctgcgggacgcaatgccactgaaacttgtgcagaggaggatccaggacatcctgtgcaacggggagccgctgtggaagatacggccgaggagctatggaagggcaaggatcctcgtcggacatatcgtggaccatgaccttgagcgcctaggtttggagtacccggcattcatgatcagggacaccgcaaagtacccgcccctgatgaaaaccaccaagctgagcaacaccctgaagtacctcgcacaagcatatcttggatatgatgtccatactggcattcaggatccatatgaggattgcgtcgcggcgatgcgactatatatcaggatgagatcacaagctcacccgcgagactacgccaccggttcaggggaggtgcagaataactatccggcctggaggcagagggagctggagaggatgagcccggaagaactcctggcactttcaggatcagactactactgctggtgcctggacccctagacggatgagctgaagagaacaaggcccggccggccgaccgatgctggttcggtcatactccatccgtagtaataaggactacgtatgtctaattatctttggacttatatatgtatggtgggattgagtataatattggtgatcaagagttgtatgagtcgtatttaagagcaatgatatatagtaaga

SEQ ID NO: 231 - DNA, 1979 bp, Hordeum vulgare
  source 1..1979: mol_type = genomic DNA
atttgagagatcttgatcgacctgcaggaagaatctccaggagcgcgatggacagcagaagggagtccgcggagaccttgaggtatgaagacgttgagaaacgccatttttccttaccatagctagtgacctgctaacatacagcagtagccggtagggttgcctagctcgaaggaagggtgccaggagagatgatggacgcttgcctgactgaagcatgtgtgtgtgtgtaccaggaacaagtgctcggcctgcttccggcagtacaacaagatggagcaccttgtggagcacatgaaggtgtcgtaccactcggtccacgagcccaagtgcggcgcctgcaggaagcactgccgctccttcgagtccctcagggagcacctcatcggtaagctaccagcaaactcaaccactaccatatctctagctatggcatcctccgtctatgtcttgggctgaacagctgaactgaacacgccgctccttgtgatcctggcaatgaagggccgttgcccaaggcggaatgtgcgcgtgtcttcagcgcccggggctgcagcatctgcctcaacatcttcgacagccccgccaccgccagatatcaccgtcacacctgccagtactcccgcgctgctccggtaattagtgttctccttctccactcccttcagtcgccgccatcgagctctacgtggcttggatgctagagctcccggccaactttttacagaaatgttgttgggagaacagaaatcagaatctgatgtttctcttcttttttctcagatgccaaagggtggcgcaggtggacgcgcggtcgccatggcctgcaagatggtcgggggagggagcgacggatcggtggacctctgcgcgagagtgtgccttgttggagaagatgagaacatcatcttccagacctatgtaaaacccacggcgcccgtcacaaactacaggtagcctacgtaccttgggactcactactgctcttgcttactagcttgacaagatcaactagatggattgttttctgaagcgcaaaagatcaagctgaccatttggctcttcaggtatgaggtgactgggataaggcccgagtacctgcgggacgcaatgccactgaaacttgtgcagaggaggatccaggacatcctgtgcaacggggagccgctgtggaagatacggccgaggagctatggaagggcaaggatcctcgtcggacatatcgtggaccatgaccttgagcgcctaggtttggagtacccggcattcatgatcaggtacagatctttgctccgcgagctacagcttgttcctactatctcttcgtgaattccctcgaaatttactactattttcttaacacaatttatctatggacgtgcagggacaccgcaaagtacccgcccctgatgaaaaccaccaagctgagcaacaccctgaagtacctcgcacaagcatatcttgggtatgtcacttgataactgaggattacaacaaactctcagaatttttctggtattttgcataatcctcaagaggttgtccttctatcgcgttgtagatatgatgtccatactggcattcaggatccatatgaggattgcgtcgcggcgatgcgactatatatcaggatgagatcacaagctcacccgcgagactacgccaccggttcaggggaggtgcagaataactatccggcctggaggcagagggagctggagaggatgagcccggaagaactcctggcactttcaggatcagactactactgctggtgcctggacccctagacggatgagctgaagagaacaaggcccggccggccgaccgatgctggttcggtcatactccatccgtagtaataaggactacgtatgtctaattatctttggacttatatatgtatggtgggattgagtataatattggtgatcaagagttgtatgagtcgtatttaagagcaatgatatatagtaaga

SEQ ID NO: 232 - protein, 342 aa, Hordeum vulgare
MDSSSDAHSRNKCAACYRQFNRMEHLVEHMRASHHSPHEPRCGVCGKHCRSLDALRDHLGFGASLPPKPACARAFAAQGCPLCLAVFPSAGSLRAHSPTCHLSRAPVPSMPMPRTPVGGAVALGCKMVGAGNDGTLDVCARVCVIDEHEAIVYEKFVRPLLPVTHYRYETTGIRPEHLRDALAVKMVQRQVEDILLNGEQPWKVRSSRGAARLLVGHGLEHDLDALGMDYPAYLKRDTAVYPPLMKTSARLMSNSLRFLTQSCLGYDIQTGHQHPYEDCVAAMRLYKKMRAMRHGRPNNVGDGDGCAAKPFPTWRQRELERMSPEELLSMSKPDYHCWCLDN

SEQ ID NO: 233 - DNA, 1143 bp, Hordeum vulgare
  source 1..1143: mol_type = other DNA
atcatggatagctcttcagatgcccacagccggaacaagtgtgcggcgtgctaccgtcagttcaacaggatggagcacctggtggagcacatgcgcgcgtcgcaccactcgccacacgagccgcgctgcggcgtctgcgggaagcactgccgctccctcgacgccctccgtgaccacctcggcttcggcgcctccctccccccaaagcccgcctgcgccagggccttcgccgcccagggctgcccgctctgcctcgccgtcttccctagcgccggctccctccgcgcccacagccccacctgtcacctctctcgtgctccggttccctcgatgcctatgccaagaacgcccgtcggcggtgcggtggcgctggggtgcaaaatggtgggcgccggcaacgacgggacgctggacgtgtgcgcgcgcgtctgcgtcatcgacgagcacgaggccatcgtctacgagaagttcgtgaggccgctcctcccggtgacgcactaccggtacgagaccacggggatccgccccgagcaccttcgggacgcgctggcggtgaagatggtccagcggcaggtggaggacatcctcctcaacggcgagcagccatggaaggtccggtcctcccgcggcgcggccaggctcctcgtcgggcacggcctggagcacgatctcgacgcgctgggcatggactatccggcgtacctgaagcgggacacggcggtatacccgccgctgatgaagacgagcgccaggctgatgagcaactcgctccggttcctcactcagagctgcctcggctatgacatccagacgggccaccagcatccctacgaggactgcgtggcggccatgcggctgtacaagaagatgcgcgcgatgaggcacggccggcccaacaacgtcggagacggcgatgggtgcgccgcgaagccattcccgacgtggaggcagcgggagctggagcgcatgtcgccggaggagctcctcagcatgtccaagcccgactaccactgctggtgcctcgacaactagctagccacggcttgcctacagaattcgattcttcgctctttacatacttatatactagcaccgtacgttgcaacgaaagaaaaaatacgcataatccaaactaaataacta

SEQ ID NO: 234 - DNA, 1368 bp, Hordeum vulgare
  source 1..1368: mol_type = genomic DNA
atcatggatagctcttcagatgcccacaggtgcacacactgtccactgctccgtttgagttgttacacattttgcagtggaagaactctactgtatactctgcagtatttctcgaaagttttgtgagatcatgccacgaaattaagttatctgcacactttgtttgtttctacattacgtgataagttgaggttgattcttaagaatcttataattgttttcttaagaatctagtattcgtcgtctgcatgcagccggaacaagtgtgcggcgtgctaccgtcagttcaacaggatggagcacctggtggagcacatgcgcgcgtcgcaccactcgccacacgagccgcgctgcggcgtctgcgggaagcactgccgctccctcgacgccctccgtgaccacctcggcttcggcgcctccctccccccaaagcccgcctgcgccagggccttcgccgcccagggctgcccgctctgcctcgccgtcttccctagcgccggctccctccgcgcccacagccccacctgtcacctctctcgtgctccggttccctcgatgcctatgccaagaacgcccgtcggcggtgcggtggcgctggggtgcaaaatggtgggcgccggcaacgacgggacgctggacgtgtgcgcgcgcgtctgcgtcatcgacgagcacgaggccatcgtctacgagaagttcgtgaggccgctcctcccggtgacgcactaccggtacgagaccacggggatccgccccgagcaccttcgggacgcgctggcggtgaagatggtccagcggcaggtggaggacatcctcctcaacggcgagcagccatggaaggtccggtcctcccgcggcgcggccaggctcctcgtcgggcacggcctggagcacgatctcgacgcgctgggcatggactatccggcgtacctgaagcgggacacggcggtatacccgccgctgatgaagacgagcgccaggctgatgagcaactcgctccggttcctcactcagagctgcctcggctatgacatccagacgggccaccagcatccctacgaggactgcgtggcggccatgcggctgtacaagaagatgcgcgcgatgaggcacggccggcccaacaacgtcggagacggcgatgggtgcgccgcgaagccattcccgacgtggaggcagcgggagctggagcgcatgtcgccggaggagctcctcagcatgtccaagcccgactaccactgctggtgcctcgacaactagctagccacggcttgcctacagaattcgattcttcgctctttacatacttatatactagcaccgtacgttgcaacgaaagaaaaaatacgcataatccaaactaaataacta

SEQ ID NO: 235 - protein, 336 aa, Setaria italica
MMMGRRESSETLRNKCAACYRQYNRMEHLVEHMKVNYHSVHEPRCGVCGKHCRSFESLREHLIGPLPKVECARVFSVRGCSICLNIFDSNAAVRYHRAACQYTRAAPMPRGGITGRAVALACKMVGGGSDGSVDLCARVCLIGEDENIIFQTYVKPTAPVTNYRYEVTGVRPEYLRDAMPLKVAQRRIQEILCNGEPLWKLRPRSYGRAKILVGHGLEHDLERLGLEYPAFMIRDTAKYPPLLKTSKLSNSLKYLTQAYLGYDIQTGIQDPYEDCVAAMRLYIRMRSQAHPRDYNSGSGEAQNNYPAWRQRELERMSPEELLALSASDYYCWCLDY

SEQ ID NO: 236 - DNA, 1861 bp, Setaria italica
  source 1..1861: mol_type = other DNA
ctcgagctcgatctcttctcagggacctttgacccaagtgttggaatctgagaatgatgatgggcaggagggagtcctcggagaccttgaggaacaaatgcgcggcctgctacaggcagtacaacaggatggagcacctggtggagcacatgaaggtgaactaccactcggtgcacgagcccaggtgcggcgtctgcggcaagcactgccgctccttcgagtcgctcagggagcatctgatcgggccattgcccaaggtggagtgcgcgcgggttttcagcgtccgcggctgcagcatctgcctcaacatcttcgacagcaacgccgccgtcagataccaccgtgcagcctgccaatacactcgtgctgctccgatgcccaggggtggcataactggccgtgcggttgctctggcttgtaaaatggttggaggagggagtgacggctcagtggacctttgtgcaagggtgtgcctcattggagaagacgagaatatcatcttccagacctatgtcaaacctacagctccagtcaccaactacaggtatgaagtaactggggtaaggccagagtacttgagggacgcaatgccactgaaggttgcacagaggaggatccaggagatcttgtgcaacggggagccgctgtggaagttacgcccaaggagttatggaagggcaaagatcctggttggccatggcctggaacatgatcttgagcgcctagggttggagtaccccgcattcatgatcagggacactgcaaaatacccgcctctgttgaagactagcaaactgagtaactccctgaagtatcttacacaagcatatcttgggtatgatattcaaacaggcattcaggatccctatgaggactgtgtggcagcaatgaggctgtacatcaggatgagatcacaggctcacccgagagattataactccggttcaggtgaggcccagaacaactacccagcctggaggcagagagaactggagaggatgagcccagaagaactgctggcactttcagcatcagactattattgctggtgcctggattactaaattgatcggctataaagcgaataaggcaggccaacattgttggtccattcatattccgtctacggcaataattttagatgtacaaatagcttgcggcttgactatactggggttaattataacatatatacatgtaacgctttcatataaatattggtgatttagagctgtaagaagtgatattatcttaatgatattatatggcaagagggtttttttaccttgctttatgaatccagaaaatgagaaaaccagaagtacatcaactatacgccaaaggcagataaaaaggacatttatctacatgtaacgaatggacgattgtacattctgtgcagcgtgtcagactatctcagtgctatacaagtatatctacattagcctgcagtagaccatacctgtgcgaaatgaagattcaagtttctgagctgttgaagaagagccttacactggagtcattgaatttccggcattgcttagcttctgcgggtggattcttaggtttgggctcgtccggttttgcctgcttgtcacccttgtccttggattggctcctatttagcttgatgaactcaagacactgtcgaatgattgtcagcaccgtgaaatgtgtctcaaagtcattcttgatgacaggtggatggtggaggttgggcccattgttgctccaggtgtagttctcgatgaagtaaacacaatcagttcgggccctgaacgaaacctcccgtagtagctcttcagcctgcctaattgatctcatggccttcttaaaagtcaatacaacgatcaaattaagc

SEQ ID NO: 237 - DNA, 2853 bp, Setaria italica
  source 1..2853: mol_type = genomic DNA
ctcgagctcgatctcttctcagggacctttgacccaagtgttggaatctgagaatgatgatgggcaggagggagtcctcggagaccttgaggtaagatgataagagatgctattctttctttcagctttcagcattgatatgcgcgcttcgatgaacatgcactccaggctcaagttcatcccacactgcacctaacccttatagagatgtaggcatatatgcagaaaccatcaaggcacctcaacaatcaatctaagtcaatctaaggcttgaaacatatccattatatttactgtaaccacgtgaaaccagccagattgcggttgcagaactatacaagccgctgctccgagtaatctggaagtgtagctagattaatctatgcatcaaagtaactgaagcatgtgcatgtatgtctcccatgatcaggaacaaatgcgcggcctgctacaggcagtacaacaggatggagcacctggtggagcacatgaaggtgaactaccactcggtgcacgagcccaggtgcggcgtctgcggcaagcactgccgctccttcgagtcgctcagggagcatctgatcggtacgcagaaaactgagaaccaaggacagcagctcacagctgaacgatcgtggtttctgacgctgcctcttctcaatctttagggccattgcccaaggtggagtgcgcgcgggttttcagcgtccgcggctgcagcatctgcctcaacatcttcgacagcaacgccgccgtcagataccaccgtgcagcctgccaatacactcgtgctgctccggtaatgatttactgatttctactctattcattcatattaccatatattcagttcatttcagaactcagatgcatagacatccctttgttgtgactttggttgatgctagattctaacatttttcttcctttccatctggtcccagatgcccaggggtggcataactggccgtgcggttgctctggcttgtaaaatggttggaggagggagtgacggctcagtggacctttgtgcaagggtgtgcctcattggagaagacgagaatatcatcttccagacctatgtcaaacctacagctccagtcaccaactacaggtaacatttcattccattacttttcctgcataccagtagtctcccatttgtaatagatggtacaagagaaattatcaaaccagcgaaaaaaaccagaaagaaagcattagcgatcattgagtggacactatgctggaaactggacaggagatttgcatggaccactttctaaaatgagacgagctgattatttgtgtgttcaggtatgaagtaactggggtaaggccagagtacttgagggacgcaatgccactgaaggttgcacagaggaggatccaggagatcttgtgcaacggggagccgctgtggaagttacgcccaaggagttatggaagggcaaagatcctggttggccatggcctggaacatgatcttgagcgcctagggttggagtaccccgcattcatgatcaggtgaggagaactagataactaagtgggttgtagtctatctgctttctaacatatatagatcttgcttacctagctatggtttaggaatccagagtcaaagttgctacggtttctaacattgacgcatgtgcagggacactgcaaaatacccgcctctgttgaagactagcaaactgagtaactccctgaagtatcttacacaagcatatcttgggtatgtcactagcaggctattctaaacaatcagcctactacttagtatctccgtaatgctaaatagattgtttttgcatcttattgtaggtatgatattcaaacaggcattcaggatccctatgaggactgtgtggcagcaatgaggctgtacatcaggatgagatcacaggctcacccgagagattataactccggttcaggtgaggcccagaacaactacccagcctggaggcagagagaactggagaggatgagcccagaagaactgctggcactttcagcatcagactattattgctggtgcctggattactaaattgatcggctataaagcgaataaggcaggccaacattgttggtccattcatattccgtctacggcaataattttagatgtacaaatagcttgcggcttgactatactggggttaattataacatatatacatgtaacgctttcatataaatattggtgatttagagctgtaagaagtgatattatcttaatgatattatatggcaagagggtttttttaccttgctttatgaatccagaaaatgagaaaaccagaagtacatcaactatacgccaaaggcagataaaaaggacatttatctacatgtaacgaatggacgattgtacattctgtgcagcgtgtcagactatctcagtgctatacaagtatatctacattagcctgcagtagaccatacctgtgcgaaatgaagattcaagtttctgagctgttgaagaagagccttacactggagtcattgaatttccggcattgcttagcttctgcgggtggattcttaggtttgggctcgtccggttttgcctgcttgtcacccttgtccttggattggctcctatttagcttgatgaactcaagacactgtcgaatgattgtcagcaccgtgaaatgtgtctcaaagtcattcttgatgacaggtggatggtggaggttgggcccattgttgctccaggtgtagttctcgatgaagtaaacacaatcagttcgggccctgaacgaaacctcccgtagtagctcttcagcctgcctaattgatctcatggccttcttaaaagtcaatacaacgatcaaattaagc

SEQ ID NO: 238 - protein, 342 aa, Setaria italica
MDSSSDAHGRHRCAACFRQFNKMEHLVEHMRAARHSAHEPRCGLCGKHCRSFEALRDHLGVGGSTLPKATACADAFAARGCAICLRVTPHHRASCTLARTPRTPQAAAPPQGGGSGRALALGCKMVGAGSDGSLDVVARVCVVDEQENIVYEAFVKPLIPVTHYRYETTGIRPENLRDGGGAVTVKAAQRRVQDLLLAGEQPWKVRTSRGRARLLVGHGLDHDLDALGMDYPAYLKRDTAAYPPLMKTSKLSNSLRFLTRTYLGYEIQTGHQHPYEDCVAAMRLYRRMKEQGHTRRGGDADEPAASADQAFPAWRQRELERMTPEELLRLSTPDYRCWCLDD

SEQ ID NO: 239 - DNA, 1122 bp, Setaria italica
  source 1..1122: mol_type = other DNA
cccgtgcgcagccttcgccgcgacagctcgaccgacaccaatcgacaggttcagtgagctgtgctagtgacgaactgactgaactgactgacgatggatagctcctctgatgctcatgggcgtcacaggtgcgcggcgtgcttccggcagttcaacaagatggagcacctggtggagcacatgcgggcggcgcggcactcggcgcacgagccccgctgcggcctctgcggcaagcactgccgctccttcgaggcgctccgcgatcacctcggcgtcggcggctccacgctgcccaaggccaccgcctgcgccgacgccttcgccgcgcgcggctgcgccatctgcctccgcgtcacgccccaccaccgcgcctcctgcacgctcgcgcgcacccccaggacgccgcaggcggcggcgccgccccagggaggaggaagtgggcgggcgctggcgctgggctgcaagatggtcggtgccggcagcgacggctccctggacgtggtggcgcgggtgtgcgtcgtcgacgagcaggagaacatcgtgtacgaggccttcgtgaagccgctcatcccggtgacgcactaccggtacgagacgacggggatccggccggagaacctccgcgacggcggcggcgccgtgacggtgaaggccgcgcagcggcgggtgcaggacctgctgctcgccggcgagcagccgtggaaggtgcgcaccagccggggccgggccaggctgctggtgggccatggcctggaccacgacctcgacgcgctggggatggactacccggcctacctcaagcgcgacacggccgcgtacccgccgctgatgaagacgagcaagctcagcaactcgctcaggttcctcacgcgcacctacctcgggtacgagatccagacggggcaccagcacccctacgaggactgcgtcgccgccatgcgcctctaccgcaggatgaaggagcagggccacaccaggcgtggcggcgacgccgacgagccggcggccagcgcggaccaggcgttcccggcgtggaggcagcgggagctggagcgcatgacgcccgaggaactgctccggctctccacgccggactaccgctgctggtgcctcgatgactag

SEQ ID NO: 240 - DNA, 1337 bp, Setaria italica
  source 1..1337: mol_type = genomic DNA
cccgtgcgcagccttcgccgcgacagctcgaccgacaccaatcgacaggttcagtgagctgtgctagtgacgaactgactgaactgactgacgatggatagctcctctgatgctcatgggtgagttgcaacttctctactctcttcagacctcgctgaagggttcagcacttcagcatcacttcagtctctttagacgaaggcaaggcccaaggggacataacacttgcatgcatgcttttgatggcacaattagacagcttaaacatgctttaatttgtagtataatatcttattctaaccaacccttgaaaaatgtgattgcgttatggcaggcgtcacaggtgcgcggcgtgcttccggcagttcaacaagatggagcacctggtggagcacatgcgggcggcgcggcactcggcgcacgagccccgctgcggcctctgcggcaagcactgccgctccttcgaggcgctccgcgatcacctcggcgtcggcggctccacgctgcccaaggccaccgcctgcgccgacgccttcgccgcgcgcggctgcgccatctgcctccgcgtcacgccccaccaccgcgcctcctgcacgctcgcgcgcacccccaggacgccgcaggcggcggcgccgccccagggaggaggaagtgggcgggcgctggcgctgggctgcaagatggtcggtgccggcagcgacggctccctggacgtggtggcgcgggtgtgcgtcgtcgacgagcaggagaacatcgtgtacgaggccttcgtgaagccgctcatcccggtgacgcactaccggtacgagacgacggggatccggccggagaacctccgcgacggcggcggcgccgtgacggtgaaggccgcgcagcggcgggtgcaggacctgctgctcgccggcgagcagccgtggaaggtgcgcaccagccggggccgggccaggctgctggtgggccatggcctggaccacgacctcgacgcgctggggatggactacccggcctacctcaagcgcgacacggccgcgtacccgccgctgatgaagacgagcaagctcagcaactcgctcaggttcctcacgcgcacctacctcgggtacgagatccagacggggcaccagcacccctacgaggactgcgtcgccgccatgcgcctctaccgcaggatgaaggagcagggccacaccaggcgtggcggcgacgccgacgagccggcggccagcgcggaccaggcgttcccggcgtggaggcagcgggagctggagcgcatgacgcccgaggaactgctccggctctccacgccggactaccgctgctggtgcctcgatgactag

SEQ ID NO: 241 - protein, 337 aa, Sorghum bicolor
MVDSRRESSETLRNKCAACFRQYNRMEHLVEHMKVSYHSVHEPKCGVCRKHCRSFESLREHLIGPLPKVECARVFSVRGCSICLNIFDSNATVRYHRAACQYSRAAPQMPRGGITGRAVALACKMVGGGSDGSMDLCAKVCLIGEDEHIIFQTYVKPILPVTNYRYEVTGIRPEYLRDAMPLKVAQRRIQEILCNGEPLWKLRPRSYGRAKILVGHGLDHDLERLGLEYPAFMIRDTAKYPPLVKTSKLSNSLKYLTQAYLGYDIHTGIQDPYEDCVAAMRLYIRMRSQAHPRDYNSGSGEAQNNYPAWRQRELERMSPEELLALSASDYYCWCLDY

SEQ ID NO: 242 - DNA, 1299 bp, Sorghum bicolor
  source 1..1299: mol_type = other DNA
cgatcttggcctctcagggaccttgaccgcccaagtcccgaattgtaggaatctgagcgagggctcatggtggacagcaggagggagtcctcggagaccttgaggaacaaatgcgcagcctgcttcaggcagtacaacaggatggagcacctggtggagcacatgaaggtctcgtaccactcggtgcacgagcccaagtgcggcgtctgccggaagcactgccgctccttcgagtcgctcagggagcatctcatcgggccgttgcccaaggtggagtgcgcgcgggtcttcagcgtccgcggctgcagcatctgcctcaacattttcgacagcaacgccaccgtcagataccaccgtgctgcctgccaatactctcgtgctgctccgcagatgcccaggggtggcataactggccgtgcggttgcactggcttgcaaaatggtagggggagggagtgacggctcaatggacctttgtgcaaaggtgtgcctcattggagaagatgagcacatcatcttccagacctatgtcaagcctatacttcctgtaaccaactacaggtatgaagtaactgggataaggccagagtacttgagggatgcaatgccgcttaaggttgcgcagaggagaatccaggaaatcctgtgcaacggggagccgctgtggaagttacgcccaaggagctatgggagggcaaagatccttgttggtcatggcctggaccatgaccttgagcgcctagggttggagtacccagcattcatgattagggatactgcgaaatacccaccactagtgaagactagcaagctgagtaactccctgaagtaccttacacaagcataccttgggtatgatatacatactggcattcaggacccctacgaggactgcgttgcagcaatgaggctgtacatcaggatgagatcacaagctcacccgagagattacaactccggctctggcgaggcccagaacaactacccagcctggaggcagagagagctcgagaggatgagcccagaagaactcctggcactttcagcatcagattactattgctggtgcctggattactaaactgatcggctataaagaaaataaggcaggccaacattgttggttcatccatattccgtctatgataataaatctttagatgtagcttgcggcttgactatatatttgggttaactatgacgtataaacaaaggattatgtatacatgtaatgatgctttcatataagctagtattgttgttttagatctgtataagaagtgatattatgatttatgat

SEQ ID NO: 243 - DNA, 2399 bp, Sorghum bicolor
  source 1..2399: mol_type = genomic DNA
cgatcttggcctctcagggaccttgaccgcccaagtcccgaattgtaggaatctgagcgagggctcatggtggacagcaggagggagtcctcggagaccttgaggtaagatgataagagacgatgctattctttcagctttcattgatatgcgtactgcaaatggccgtgcactcatcagactgattaagtgcatgcacgcatgtccatttcttgttactatgagcctgtcagactgcggttgcgagagctaggcagctagcgagctatgctgttcatgcatgaaactgctcgtgcaaggatcatcagctagtttcagttcgcctcctgcattcgatcctatatatgttcctgaaagctagaatccatgcatcatgatcacaaacacatatatacgaatgaattccctcatgcatgttatttatgccccccatgaatcatgatcatcaggaacaaatgcgcagcctgcttcaggcagtacaacaggatggagcacctggtggagcacatgaaggtctcgtaccactcggtgcacgagcccaagtgcggcgtctgccggaagcactgccgctccttcgagtcgctcagggagcatctcatcggtatgcacaaataaagcttttgctgacaagaaaaagacggcagcttaattaactacatacagctgaactcaattctgacgacgcttcttgttcttcttctccatcttccttcagggccgttgcccaaggtggagtgcgcgcgggtcttcagcgtccgcggctgcagcatctgcctcaacattttcgacagcaacgccaccgtcagataccaccgtgctgcctgccaatactctcgtgctgctccggtaatcatatcgatccatctgttgctctctaccctattcattattcatcatatgccgtatatatattcagttgatcttccctcgtgaagggctgaaggctttggttgatatatactagattctaatgtttttttttccaccctcctatatatgtggtcccagcagatgcccaggggtggcataactggccgtgcggttgcactggcttgcaaaatggtagggggagggagtgacggctcaatggacctttgtgcaaaggtgtgcctcattggagaagatgagcacatcatcttccagacctatgtcaagcctatacttcctgtaaccaactacaggtaatcctacttctcatgcagttgtcatgcatcatgttactagtctactagcaactctagctagtcgatagttgaggagaaattgtgagaccagcaaaatcagaaagaaagaatcggcaatctttcagggtgtaccactatatatatgcttgaaacttgaaactctcgagaggacagggaagatatctggatggactaattttgtgacgacacgaactgatgactatatgtaacatgtttttcaggtatgaagtaactgggataaggccagagtacttgagggatgcaatgccgcttaaggttgcgcagaggagaatccaggaaatcctgtgcaacggggagccgctgtggaagttacgcccaaggagctatgggagggcaaagatccttgttggtcatggcctggaccatgaccttgagcgcctagggttggagtacccagcattcatgattaggtgagaagcagaaaaaaaaatgtcactgaatttctcttttcttcattcctaacatttatagatctttgcttgctgagctatggttcaggaatcagctaccacagttgttttgccctttttgacagaaaaaattgttatgcatatgcagggatactgcgaaatacccaccactagtgaagactagcaagctgagtaactccctgaagtaccttacacaagcataccttgggtatgtcacttcttgaatgatctatgcagtcagcctactatttcatatctgcgtaatgatgctaaggagattgtatcctcttgtaggtatgatatacatactggcattcaggacccctacgaggactgcgttgcagcaatgaggctgtacatcaggatgagatcacaagctcacccgagagattacaactccggctctggcgaggcccagaacaactacccagcctggaggcagagagagctcgagaggatgagcccagaagaactcctggcactttcagcatcagattactattgctggtgcctggattactaaactgatcggctataaagaaaataaggcaggccaacattgttggttcatccatattccgtctatgataataaatctttagatgtagcttgcggcttgactatatatttgggttaactatgacgtataaacaaaggattatgtatacatgtaatgatgctttcatataagctagtattgttgttttagatctgtataagaagtgatattatgatttatgat

SEQ ID NO: 244 - protein, 361 aa, Sorghum bicolor
MDSASDAHGRHKCAACFRQFNKMEHLVEHMRAARHSSHEPRCDICRKHCRSFEALRDHLGVGGSTLPKAAYCADAFAARGCTICLRVLASAAALGAHSAACRLSRIPPPMMSRALQHHQLPAATQPHGGGGEGGALALGCKMVGAGSDGSLDVCARVCVIDEQENILFEAFVKPLLPVTHYRYETTGIRPEHLRDGASTTVKNAQRRVEELLLNGEQPWKVRTSRGRARLLVGHGLDHDLDALGMDYPGYLKRDTATYPPLMKTSKLSNSLRFLTHKYLGYDIQTGHQHPFEDCVAAMRLYRRMRGQQQHPRGGGGDADAPAAATADQAFPAWRQRELERMTPEELLRLSTPDYRCWCLDA

SEQ ID NO: 245 - DNA, 1320 bp, Sorghum bicolor
  source 1..1320: mol_type = other DNA
cacacacggcagaaagctttggtaaagtgagtgagcgagcgagcagcagtggctgtcgctcgcgatgatcatgagtgttcgatcatcacatagtgacacaacaatggcgacagaggatctagttccatcctccggcctagtataaataggcacccgtgttaaggctccttgctgacagatcatcacatcggtcgaccaaccgagcagttcagtgaaccgtagatcgacgtgacgatggatagcgcctcagatgctcatgggcgtcacaagtgcgcggcatgcttccggcagttcaacaagatggagcacctggtggagcacatgcgggcggcgcggcactcgtcgcacgagccccgctgcgacatctgccgcaagcactgccgctccttcgaggcgctcagggaccacctcggcgtcggcggctccacgctgcccaaggccgcctactgcgccgacgccttcgccgcgcgcggctgcaccatctgcctccgcgtcctcgccagcgccgccgcgctcggagcccacagcgcggcgtgccggctctcgcgcatcccaccgccgatgatgtcgagggcgctgcagcatcaccagcttccagcagcaacgcagccgcatggaggaggaggagaaggaggcgcgctggcgctgggctgcaagatggtcggcgccgggagcgacgggtccctggacgtgtgcgcgcgggtgtgcgtcatcgacgagcaggagaacatcctgttcgaggccttcgtgaagccgctcctcccggtgacgcactaccggtacgagacgacggggatccggccggagcacctccgcgacggcgcgagcacgacggtgaagaacgcgcagcggcgggtggaggagctgctgctcaacggcgagcagccgtggaaggtgcgcacgagccggggcagggcgaggctgctggtcgggcacggcctggaccacgacctcgacgcgctgggcatggactacccgggctacctcaagcgcgacacggccacgtacccgccgctgatgaagacgagcaagctcagcaactcgctcaggttcctgacgcacaagtacctcgggtacgacatccagacggggcaccagcaccccttcgaggactgcgtcgccgccatgcgcctctaccgcaggatgcgcgggcagcagcagcaccccaggggcggcggcggcgacgccgacgcaccggcggcggcgaccgcggaccaggcgttcccggcgtggaggcagcgggagctcgagcgcatgacgcctgaggagctccttcggctctccacgccggactaccgctgctggtgcctcgatgcgtag

SEQ ID NO: 246 - DNA, 2515 bp, Sorghum bicolor
  source 1..2515: mol_type = genomic DNA
cacacacggcagaaagctttggtaaagtgagtgagcgagcgagcagcagtggctgtcgctcgcgatgatcatgagtgttcgatcatcacatagtgacacaacaatggcgacagaggatctagttccatcctccggcctagtataaataggcacccgtgttaaggctccttgctgacagatcatcacatcggtcgaccaaccgagcagttcagtgaaccgtagatcgacgtgacgatggatagcgcctcagatgctcatgggtgagttgatgctgctctgagtcttgaggtcacaatgtatgctttaagcctcaaacatatatatattcctttgagtttgaggtaaatgcatgctatacctaccatgcttgggacacctggattttgtgaaccacttctatcacaaaaatataaggccatcagtgtttgttcgaaatccttttttggtttcactaccaatgtgtggctctaattttatatgagttgacagcataaaatttgcattactagaaccattgtggaccatctattgctagttaaagtttctttttgaaacgaccggctaggagttttgtctggcatgtattaatagagaagaagattgggtttaaatttgaaatagaagttcaaaaagaaggttgggttgggggtggggggcgtaatgaagttattatattatagaggtccagtagagggccactctctcagagatgatctccttgagtctctcggctcctgcaaggctgcaaggcatcatctgatgctcacttcctccttgattttcacaattaggcttcccaaaggggaatcgtgactttgaaaaaactagcattgtgtcacttccagagctcccaagctgctactacgattgttcaacgaccgaatggctttagtagacatgtcagcagcctttcccactgcatgccacgaaatggacacagattgaaaggaagcccaatcatttccttttttcccttgaatgaacggggctatgtctatttcatcattgatataaggagagaacaaacagacagtccgttttaaagtaaaagaaaacaaactatgatggttactctctcgacacaagaatcacaagactttttgctcctaccgcaatccatgaccccggttcccgctttgatttgtgcaaagagagatatagtgtttcactcttctcaaagattattgtgtttggttccttacaaatctctcaaatgataagaagggcaatactcctaaccgccctgcaagggacatctccaatggtccaaatggccaggcatttttaagttagaacaaagatcatatatttatgatgagcactttgaacttatgatgggaatcttgtataaaaagagaagtaaaactatgctgattcaattcaagtgcaagcaacttggcaaacacaagtccatcgggaagtaaacacattcctgtgatttgtttttggcggcaggcgtcacaagtgcgcggcatgcttccggcagttcaacaagatggagcacctggtggagcacatgcgggcggcgcggcactcgtcgcacgagccccgctgcgacatctgccgcaagcactgccgctccttcgaggcgctcagggaccacctcggcgtcggcggctccacgctgcccaaggccgcctactgcgccgacgccttcgccgcgcgcggctgcaccatctgcctccgcgtcctcgccagcgccgccgcgctcggagcccacagcgcggcgtgccggctctcgcgcatcccaccgccgatgatgtcgagggcgctgcagcatcaccagcttccagcagcaacgcagccgcatggaggaggaggagaaggaggcgcgctggcgctgggctgcaagatggtcggcgccgggagcgacgggtccctggacgtgtgcgcgcgggtgtgcgtcatcgacgagcaggagaacatcctgttcgaggccttcgtgaagccgctcctcccggtgacgcactaccggtacgagacgacggggatccggccggagcacctccgcgacggcgcgagcacgacggtgaagaacgcgcagcggcgggtggaggagctgctgctcaacggcgagcagccgtggaaggtgcgcacgagccggggcagggcgaggctgctggtcgggcacggcctggaccacgacctcgacgcgctgggcatggactacccgggctacctcaagcgcgacacggccacgtacccgccgctgatgaagacgagcaagctcagcaactcgctcaggttcctgacgcacaagtacctcgggtacgacatccagacggggcaccagcaccccttcgaggactgcgtcgccgccatgcgcctctaccgcaggatgcgcgggcagcagcagcaccccaggggcggcggcggcgacgccgacgcaccggcggcggcgaccgcggaccaggcgttcccggcgtggaggcagcgggagctcgagcgcatgacgcctgaggagctccttcggctctccacgccggactaccgctgctggtgcctcgatgcgtag

SEQ ID NO: 247 - protein, 335 aa, Miscanthus sinensis
MDSRRESSETLRNKCAACFRQYNRMEHLVEHMKVSYHSVHEPKCGVCGKHCRSFESLREHLIGLLPKVECARVFSVRGCSICLNIFDSNATVRYHRAACQYSRAAPMPRGGITGRAVALACKMVGGGSDGSMDLCARVCLIGEDEHIIFQTYVKPTLPVTNYRYEVTGIRPEYLRDAMPLKVAQRRIQEILCNGEPLWKLRPRSYGRAKILVGHGLDHDLERLGLEYPAFMIRDTAKYPPLMKTSKLSNSLKYLTQAYLGYDIHTGIQDPYEDCVAAMRLYIRMRSQAHPRDYNSGSGEAQNNYPAWRQREFERMSPEELLALSASDYYCWCLDY

SEQ ID NO: 248 - DNA, 2192 bp, Miscanthus sinensis
  source 1..2192: mol_type = other DNA
acatgttgggaagagcaatctcgtttgataacatcctagaacttttgatagtgcaaattgctgctgcttaataggcagtagttaggcataagacaggtgtatttctctctcgaaccatcgtcgccctatgaatgaaagactgaaagtgacaaccttaggagtactaggtacttagaatgaccagaaaagggagttgccggtacttagcttacgataactgcaactttagaatggcaaggctgatccctcgtgaaggctttatctctcggcattgcctataaatagcctcctggcgtcgcccatcctctcgccagcctcgagatcgatctaggcctctcagggaccttgatcccccaagtcccgaattgtaggaatctgagggctgatggacagcaggagggagtcctcggagaccttgaggaacaaatgcgcagcctgcttcaggcagtacaacaggatggagcacctggtggagcacatgaaggtctcgtaccactcggtgcacgagcccaagtgcggcgtctgcgggaagcactgccgctccttcgagtcgctcagggagcatctcatcgggctgttgccgaaggtggagtgcgcgcgggtcttcagcgtccgcggctgcagcatctgcctcaacatttttgacagcaacgccaccgtcagataccaccgtgcggcctgccaatactctcgtgctgctccgatgcccaggggtggcataaccggtcgtgcggttgccctggcttgcaaaatggtagggggagggagtgacggttcaatggacctttgtgcaagggtgtgcctcattggagaagatgagcacatcatcttccagacctatgtcaaacctacacttcctgtcaccaactacaggtatgaagtaactgggataaggccagagtacctgagggatgcaatgccgcttaaggttgcgcagaggagaatccaggaaatcctgtgcaacggggagccactgtggaagttacgcccaaggagctatgggagggcaaagatccttgttggtcatggcctggaccatgaccttgagcgcctagggttggagtacccggcattcatgattagggatactgcgaaatacccaccactaatgaagactagcaagctgagtaactccctgaagtaccttacacaagcataccttgggtatgatatccatactggcattcaggacccctacgaggactgtgttgcagcaatgaggctgtacatcaggatgagatcacaagctcacccaagagattacaactccggctcaggcgaggcccagaacaactatccagcctggaggcagagagagttcgagaggatgagcccagaagaactcctggcactttcagcatcagactactattgctggtgcctggattactaaactgatagtctataaagaaaataaggcaggccaacattgttggttcattcatattccgtctatgataataaatctttagatgtacaagtagcttgcggcttgactatatattggggttaattatgatgtataaacaaatgattttatatatatgtaatgatgctttcatataaagattgctgttgtagatctggataacaagtattattatgatttatgatgcatatggaaagagggtttcccgcttgctttttataaattctaaaatgagaaaagcagcagcacatcttgatttatgtacataaaacgaatggatgattgtacattttgtgcagcttgtcagactatctcagtgctatacaagtatatctgcattagcctcagtgcatcacacgtatgtaaaccgggcgattcaagtttctgaactgttgaagaaaagtcttacactggagtcgttggatttccggtactgcttagtttctgtgggtggattcttaggtttaggctcgggtgttttttcctgcttgccattctttttcttgtccttggactggctcctatttagcttgatgaactcaagacactgtcgaatgattgtcagcaccgtgaaatgagtctcaaagtcgttcttgatgacaggggggtggtggaggttgggcccattgttgctccaggtgtagttctcaatgaagtagacacaatcagttctagccctgaacgaaacctcccgtagaagctcttcggcctgcctaatggatctcatggccttcttaaaagtcaatacgatgatcaaattaag

SEQ ID NO: 249 - DNA, 3368 bp, Miscanthus sinensis
  source 1..3368: mol_type = genomic DNA
acatgttgggaagagcaatctcgtttgataacatcctagaacttttgatagtgcaaattgctgctgcttaataggcagtagttaggcataagacaggtgtatttctctctcgaaccatcgtcgccctatgaatgaaagactgaaagtgacaaccttaggagtactaggtacttagaatgaccagaaaagggagttgccggtacttagcttacgataactgcaactttagaatggcaaggctgatccctcgtgaaggctttatctctcggcattgcctataaatagcctcctggcgtcgcccatcctctcgccagcctcgagatcgatctaggcctctcagggaccttgatcccccaagtcccgaattgtaggaatctgagggctgatggacagcaggagggagtcctcggagaccttgaggtaagatgataagagatgctattctttcagctttcattgatatgcgtactactgcaaatggccgtgcactcagactgattaagtagtgcatgcatggcatactgcacctgtcccttgtgggcatatatatgcaatatatttaaacagtgcccaagatatcatcaagtcagttcactaatctatgcaaggcttgaaacatgcatgtccatttcttgtaaccatatgatcctgtcagactgccgttgcgagagctgctagctgttcatgcatgaaactgctcgtgcaaggatcagctttgcctcctgcattcgatcctgtatatgttcctgaaggctagaatccatacatcatgatcacaaacatatatatgaatgcccgcctcatgcaaagtcgtgtcccccatgatcatcaggaacaaatgcgcagcctgcttcaggcagtacaacaggatggagcacctggtggagcacatgaaggtctcgtaccactcggtgcacgagcccaagtgcggcgtctgcgggaagcactgccgctccttcgagtcgctcagggagcatctcatcggtatgcagaaattaagcttttgccgagaagaaaagacggcagcttacatgcagcccaacaagcacgatttcaattctgacgacgcttcttcttcttcttctccatcttccttcagggctgttgccgaaggtggagtgcgcgcgggtcttcagcgtccgcggctgcagcatctgcctcaacatttttgacagcaacgccaccgtcagataccaccgtgcggcctgccaatactctcgtgctgctccggtaatgatatcgatcgatctgttggtctctaccctattcattattcatatgccgtatactcagttccacttcagagctcatcagatgcataggcttcgctttgtcggctttgggctttggttgatactatagattctaatttttgttccaccgtcctatgtggtcccagcagatgcccaggggtggcataaccggtcgtgcggttgccctggcttgcaaaatggtagggggagggagtgacggttcaatggacctttgtgcaagggtgtgcctcattggagaagatgagcacatcatcttccagacctatgtcaaacctacacttcctgtcaccaactacaggtaatcctacttctcatgcagttgccatgcatcatgttactagtctactagcaactctagtcgatggttgaggagaaattgtgagaccagcaaaaccagaatgaaagagtcggcaatctttcagggagtaccactatatatgtgcttgaaagttgaagttggacagcgaagatatttgtatggactactttcgtaacgacacgaactgatggctatatgcaacatgtttttcaggtatgaagtaactgggataaggccagagtacctgagggatgcaatgccgcttaaggttgcgcagaggagaatccaggaaatcctgtgcaacggggagccactgtggaagttacgcccaaggagctatgggagggcaaagatccttgttggtcatggcctggaccatgaccttgagcgcctagggttggagtacccggcattcatgattaggtgaggagcagggaggaaaaaaatcactgtatttttcttttcttcctaacatctataggtcttgcttgttgagctatgtatggttcaggaatcagttaccacagttattttgccctttttgacagaaattgttatgcatatgcagggatactgcgaaatacccaccactaatgaagactagcaagctgagtaactccctgaagtaccttacacaagcataccttgggtatgtcacttcttggatgatctatacaatcagaatcagcctactattatttaatatctgggtaataatgattctaaggagattgtatcctcttgtaggtatgatatccatactggcattcaggacccctacgaggactgtgttgcagcaatgaggctgtacatcaggatgagatcacaagctcacccaagagattacaactccggctcaggcgaggcccagaacaactatccagcctggaggcagagagagttcgagaggatgagcccagaagaactcctggcactttcagcatcagactactattgctggtgcctggattactaaactgatagtctataaagaaaataaggcaggccaacattgttggttcattcatattccgtctatgataataaatctttagatgtacaagtagcttgcggcttgactatatattggggttaattatgatgtataaacaaatgattttatatatatgtaatgatgctttcatataaagattgctgttgtagatctggataacaagtattattatgatttatgatgcatatggaaagagggtttcccgcttgctttttataaattctaaaatgagaaaagcagcagcacatcttgatttatgtacataaaacgaatggatgattgtacattttgtgcagcttgtcagactatctcagtgctatacaagtatatctgcattagcctcagtgcatcacacgtatgtaaaccgggcgattcaagtttctgaactgttgaagaaaagtcttacactggagtcgttggatttccggtactgcttagtttctgtgggtggattcttaggtttaggctcgggtgttttttcctgcttgccattctttttcttgtccttggactggctcctatttagcttgatgaactcaagacactgtcgaatgattgtcagcaccgtgaaatgagtctcaaagtcgttcttgatgacaggggggtggtggaggttgggcccattgttgctccaggtgtagttctcaatgaagtagacacaatcagttctagccctgaacgaaacctcccgtagaagctcttcggcctgcctaatggatctcatggccttcttaaaagtcaatacgatgatcaaattaag

SEQ ID NO: 250 - protein, 335 aa, Panicum virgatum
MDTRKESSETLRNKCAACYRQYNRMEHLVEHMKVNYHSVHEPRCGVCGKHCRSFESLREHLIGPLPKVECARVFSVRGCSICLNIFDSNAAVRYHRAACQYTRAAPMPMGSITGRAVSLACKMVGGGSDGSVDLCARVCLTGEDENVIFQTYVKPTAPVTNYRYEVTGIRPEYLRDAMPLKIAQRRIQEILCNGEPLWKLRPRSYGRAKILVGHGLDHDLERLGLEYPAFMIRDTAKYPPLMKTSKLSNSLKYLTQAYLGYDIQTGIQDPYEDCVAAMRLYIRMRSQAHPRDYNSGSGEAQNNYPAWRQRELERMSPEELLALSASDYYCWCLDY

SEQ ID NO: 251 - DNA, 1340 bp, Panicum virgatum
  source 1..1340: mol_type = other DNA
cgagctcgatctcttctcaggaacccttgaccaaagtgtaggagtctgagtcatggacaccaggaaggagtcctcggagaccttgaggaacaaatgcgcagcctgctacaggcagtacaacaggatggagcaccttgtggagcacatgaaggtgaactaccactcggtgcacgagcctaggtgtggcgtctgcggcaagcactgccgctccttcgagtcgctcagggagcatctcatcgggcctttgccaaaggtggagtgcgcgcgggtcttcagtgttcgcggctgcagcatctgcctcaacatctttgacagcaacgccgctgtcagatatcaccgtgctgcctgccaatacacccgtgctgctccgatgcccatgggcagcataaccggccgtgcggtttctctggcctgcaaaatggttggaggagggagtgacggctcagtggacctttgtgcaagggtgtgcctcactggagaagacgagaatgtcatcttccagacctatgtcaaacctacagctcctgttaccaactacaggtatgaagtaactgggataaggccagagtacttgagggacgcaatgccactgaagattgcacagaggaggattcaggagatcctgtgcaatggggagcctctgtggaagttacgcccaaggagttatggaagggcaaagattctggttggccatggcctggaccatgatctggagcgcctagggttggagtacccagcattcatgatcagggacactgcaaaatacccacctctgatgaagactagcaagctgagtaactccctgaagtaccttacacaagcatatctgggatatgacattcaaacaggcattcaggacccctacgaggattgcgtggcagcaatgaggctgtacatcaggatgcgatcacaagctcacccgagagattacaactctggttcaggtgaggcccagaacaactacccagcctggaggcagagagagctggagaggatgagcccagaagaactccttgcactttcagcatcagactactattgttggtgcctggattactaattgatcagatacaatgtgaataaggcaggccaatattgttggtccattcatattctgtctatggtaataaaacctttagatgtacaagtagcttgcggcttgactatactggggtcaattataacgtatacacaagggattctatatacatgtaatgctttcttataaatattggtgatttagagatgtaagaagtgatattatgttaatgatattatatggtaagaggggttttcccccatgctttatgaatccaaaaaaaatgagaaaaccaagagta

SEQ ID NO: 252 - DNA, 2254 bp, Panicum virgatum
  source 1..2254: mol_type = genomic DNA
cgagctcgatctcttctcaggaacccttgaccaaagtgtaggagtctgagtcatggacaccaggaaggagtcctcggagaccttgaggtaagatgataagatatgctattcttccattttttttccagcattgatatcaagctatactgcaccaatcccttataggcatatgcagaaaactcatgctaaggcacctcaataccaaactaattaaggctggaaacatgtccatttattgtaaccatgaaaccagccatattgcagttgatcctgcatttggtcctacgtcatcctgtaatcaggaaggctaggttaatctacatcaaactgaagcatatgcatgtatgtcccccatgatcaggaacaaatgcgcagcctgctacaggcagtacaacaggatggagcaccttgtggagcacatgaaggtgaactaccactcggtgcacgagcctaggtgtggcgtctgcggcaagcactgccgctccttcgagtcgctcagggagcatctcatcggtaagcccaaaagaacttgctgagaggaaaagatggcagcttacttctcaacgagcgtggtttctgatgcttcttgttctccatcttcagggcctttgccaaaggtggagtgcgcgcgggtcttcagtgttcgcggctgcagcatctgcctcaacatctttgacagcaacgccgctgtcagatatcaccgtgctgcctgccaatacacccgtgctgctccggtaatggcttactgatttccactctattcattcatattatcatacataccgtatattcagtccatttcagaactcagatgcatagacttccctttgttgcgaatttggttgatactagattctaacatgtttttccctttctatgcggtcccagatgcccatgggcagcataaccggccgtgcggtttctctggcctgcaaaatggttggaggagggagtgacggctcagtggacctttgtgcaagggtgtgcctcactggagaagacgagaatgtcatcttccagacctatgtcaaacctacagctcctgttaccaactacaggtaacatttcattccatcagttctccagaccaattgtctaccatgcctagatgatggtagaagagaaagtaccagtacagctatgcctgaaactagacaatagagatttggatggacagctttctgaaatgagatgactgattacttgtgtgttcaggtatgaagtaactgggataaggccagagtacttgagggacgcaatgccactgaagattgcacagaggaggattcaggagatcctgtgcaatggggagcctctgtggaagttacgcccaaggagttatggaagggcaaagattctggttggccatggcctggaccatgatctggagcgcctagggttggagtacccagcattcatgatcaggtgaggagcacaagatagctaagtcagtggattatggtatttcttctttctaacatatacatatattgtttactgagctatggttcaggaatcaggagtcaaagttgccacgtcagttttgtcttttgacacactattgtgcatgtgcagggacactgcaaaatacccacctctgatgaagactagcaagctgagtaactccctgaagtaccttacacaagcatatctggggtatgtcactagctaggctaatctacacaatcaacctactcttaatatcttcgtaatgctaaatagattatttttgcatcctattgtagatatgacattcaaacaggcattcaggacccctacgaggattgcgtggcagcaatgaggctgtacatcaggatgcgatcacaagctcacccgagagattacaactctggttcaggtgaggcccagaacaactacccagcctggaggcagagagagctggagaggatgagcccagaagaactccttgcactttcagcatcagactactattgttggtgcctggattactaattgatcagatacaatgtgaataaggcaggccaatattgttggtccattcatattctgtctatggtaataaaacctttagatgtacaagtagcttgcggcttgactatactggggtcaattataacgtatacacaagggattctatatacatgtaatgctttcttataaatattggtgatttagagatgtaagaagtgatattatgttaatgatattatatggtaagaggggttttcccccatgctttatgaatccaaaaaaaatgagaaaaccaagagta

SEQ ID NO: 253 - protein, 335 aa, Panicum virgatum
MDSRRESSETLRNKCAACYRQYNRMEHLVEHMKVNYHSVHEPRCGVCGKHCRSFESLREHLIGPLPKVECARVFSVRGCSICLNIFDSNAAVRYHRAACQYTRAAPMPRGSITGRAVALACKMVGGGSDGSVDLCAMVCLIGEDENIIFQTYVKPTAPVTNYRYEVTGIRPEYLRDAMPLKVAQRRIQEILCNGKPLWKLRPRNYGRAKILVGHGLDHDLERLGLEYPAFMIRDTAKYPPLMKTSKLSNSLKYLTQAYLGYDIQTGIQDPYEDCVAAMRLYIRMRSQAHPRDYNSGSGEVQNNYPAWRQRELERMSPEELLALSASDYYCWCLDY

SEQ ID NO: 254 - DNA, 1281 bp, Panicum virgatum
  source 1..1281: mol_type = other DNA
gctcgatctctactcaggaacccttgacccaagtgtaggaatctgagtcatggacagcaggagggagtcctcggagaccttgaggaacaaatgcgcggcctgctacaggcagtacaacaggatggagcacctggtggagcacatgaaggtgaactaccactcggtgcacgagcccaggtgcggcgtctgcggcaagcactgccgctccttcgagtcactcagggagcatctcatcgggcctttgccgaaggtggagtgcgcgcgggtcttcagcgttcgcggctgcagcatctgcctcaacatctttgacagcaacgccgccgtcagatatcaccgtgctgcctgccaatacacccgtgctgctccgatgcccaggggcagcataactggccgtgcggttgctctggcttgtaaaatggttggaggagggagtgacggctcagtggacctttgtgcaatggtgtgcctcattggagaagacgagaatatcatcttccagacctatgtcaagcctacagctcctgttaccaactacaggtatgaagtaactgggataaggccagagtacttgagggatgcaatgccactgaaggttgcacaaaggaggatccaagagatcctgtgcaatgggaagccgctgtggaagttacgcccaaggaattatgggagggcaaagattctggttggccacggcctggaccatgatcttgagcgcctagggttggagtacccagcattcatgatcagggacactgcaaaatacccgcctctgatgaagactagcaagctgagtaactccctgaaataccttacacaagcatatctggggtatgacattcaaacaggcattcaggacccctacgaggattgtgtggcagcaatgaggctgtacatcaggatgcgatcacaagctcacccgagagattataactctggttcaggtgaggtccagaacaactacccagcctggaggcagagagagctggagaggatgagcccagaagaactccttgcactttcagcatcagactactattgctggtgcctggattactaaattgattggctataaagcgaataaggcaggccaacattgttggtccattcatattccgtctatgacaataatctttagatgtacaagttgcttgcggcttgactatactggggttaattataacatataaacaagggattctatatacatgtaatgctttcttataaatattggtgatttagagatgtaagaagtgatattattatcttaatgatattatatgg

SEQ ID NO: 255 - DNA, 2192 bp, Panicum virgatum
  source 1..2192: mol_type = genomic DNA
gctcgatctctactcaggaacccttgacccaagtgtaggaatctgagtcatggacagcaggagggagtcctcggagaccttgaggtaagatgataagatatgctattctttcagttttcagcattgatatcaagctataccacacctctcaagctaaggcacctcaattaccaatccttgtccatttcttgcaaccatgaaacaagtcagattacagtcgatcctgcattatatttgatcctacgtcgtcctgtaaccaggaaggctataggttaatctatgcatcaaaatgaagcatatgcatgtatgtcctccatggtcaggaacaaatgcgcggcctgctacaggcagtacaacaggatggagcacctggtggagcacatgaaggtgaactaccactcggtgcacgagcccaggtgcggcgtctgcggcaagcactgccgctccttcgagtcactcagggagcatctcatcggtatgcaaaaatgaatttgccaagaggaaaatatagcagcttactgctgaacgagtgtggtttctgactcttcttgttctcgatcttcagggcctttgccgaaggtggagtgcgcgcgggtcttcagcgttcgcggctgcagcatctgcctcaacatctttgacagcaacgccgccgtcagatatcaccgtgctgcctgccaatacacccgtgctgctccggtaatggtttattgatttctactctattcattcatgtatacagtatattcagtccatttcagaactcggatgcatagacttccctttgttctgactttggttgatactagattctaacatttgttttcttttccatgcggtcccagatgcccaggggcagcataactggccgtgcggttgctctggcttgtaaaatggttggaggagggagtgacggctcagtggacctttgtgcaatggtgtgcctcattggagaagacgagaatatcatcttccagacctatgtcaagcctacagctcctgttaccaactacaggtaacatttcattccatcacttctccagaccaattgtctaccatgtctagatgacggtagaagataaattagcaggccagcgaaaccagaaagaaagcattaccgatcattcaatgaacactatgcttgaaactagatagtagagatttggatggactgctttctgaaaatgagatgaccaattacttgtgtgttcaggtatgaagtaactgggataaggccagagtacttgagggatgcaatgccactgaaggttgcacaaaggaggatccaagagatcctgtgcaatgggaagccgctgtggaagttacgcccaaggaattatgggagggcaaagattctggttggccacggcctggaccatgatcttgagcgcctagggttggagtacccagcattcatgatcaggtgaggagcacaagatagctaagtcattgttttatagtatttcttctttctaacatatatagatcttgtttactgagctatggttcaggaatcaggagtcaaagtttccacgtcagttgtcttttgacacattattatacatgtgcagggacactgcaaaatacccgcctctgatgaagactagcaagctgagtaactccctgaaataccttacacaagcatatctggggtatgtcactagctaggctaatgtacacaatcaacctactctttaatatttgtgtaatgctaaatagattgtttttgcatcctattgtaggtatgacattcaaacaggcattcaggacccctacgaggattgtgtggcagcaatgaggctgtacatcaggatgcgatcacaagctcacccgagagattataactctggttcaggtgaggtccagaacaactacccagcctggaggcagagagagctggagaggatgagcccagaagaactccttgcactttcagcatcagactactattgctggtgcctggattactaaattgattggctataaagcgaataaggcaggccaacattgttggtccattcatattccgtctatgacaataatctttagatgtacaagttgcttgcggcttgactatactggggttaattataacatataaacaagggattctatatacatgtaatgctttcttataaatattggtgatttagagatgtaagaagtgatattattatcttaatgatattatatgg

SEQ ID NO: 256 - protein, 354 aa, Solanum lycopersicum
MDYRNESSDTLRNKCAACYRQFNKKEHLVEHMRTSYHSVHEPMCGVCKKHCRSFESLREHLIGPLPKAECERIFKERGCDICLSILGNRTSLRAHRESCLSRPNNNGLLYRMANLGIQDELRIDNSRGRVVALACKMVGGGSDGSLDLCARVCLIDEHERILFHSYIKPNIPVTNYRYEMTGIRPEYLRDAMPLKNVSRKIQEFLCNGEPIWQIRSKGGRSRILVGHGLDHDLKCLEMDYPAIKMRDTAKYPPLMKTSKLSNSLKYLTRAYLGYDIQSGVQDPYEDCVATMKLYMRMKLSQFHKKENYPLATDPQNKNNFASWRQNELERMTPDQLLDISRSDYYCWCLDSQDY

SEQ ID NO: 257 - DNA, 1065 bp, Solanum lycopersicum
  source 1..1065: mol_type = other DNA
atggattatagaaatgagtcttccgatactctcaggaacaagtgtgcagcgtgctataggcagttcaacaaaaaggaacatcttgtggaacacatgaggacatcttatcattcagttcatgagcccatgtgtggtgtttgcaaaaaacactgccgctcttttgaatctttaagggagcatctaattgggccacttccaaaggcagaatgtgaaagaattttcaaggaacgaggatgtgatatttgtttgtcaatccttggcaatcgaacttctctacgggctcatagagaatcatgcctctcacgtcctaataataacggtttattgtatcgcatggctaatttggggattcaagatgaactaagaattgataacagcagaggaagagtggttgctcttgcttgtaaaatggttggtggtggaagtgatggatctttagatctttgtgctagggtttgtctcattgatgaacatgaaagaatcctctttcattcatatatcaaaccaaacattcctgtcactaactacaggtatgaaatgacgggtataagaccagaatatttgagggatgcaatgcctttaaaaaatgtgtcaagaaaaattcaagaatttctttgcaatggggaacctatttggcaaatccgttctaaaggtggaaggtctaggattcttgttggccatggtttggatcatgatcttaaatgtttggagatggattatccagcaataaagatgagggatactgcaaaatacccaccacttatgaaaacaagcaagctcagtaactccctcaagtacttgaccagagcttacctcgggtatgatattcaaagtggagtacaagatccgtatgaagactgtgtggccacaatgaaactctacatgagaatgaaattatcacaatttcacaaaaaagagaattatcctcttgctactgatccacaaaataaaaataactttgcatcttggaggcaaaatgagcttgagaggatgactcctgaccaactattggatatttcaaggtctgattattattgttggtgtttggactcacaagattattaa

SEQ ID NO: 258 - DNA, 2266 bp, Solanum lycopersicum
  source 1..2266: mol_type = genomic DNA
atggattatagaaatgagtcttccgatactctcaggtaatctattcatttcatttacgcaaatatttcatttttttacgtcaacatttagattcgggtctaatgtttgatcaaacacagaaatagtcatcaaacattaacttttgaaccatatatattatctaacaaaaaattgaaaattgtaagaattttttttaagagaattgcgagagaaatttaaaaaaaaaatgaattatttactagctaaacaatttattgatgggagtacgtacgtagtacaggaacaagtgtgcagcgtgctataggcagttcaacaaaaaggaacatcttgtggaacacatgaggacatcttatcattcagttcatgagcccatgtgtggtgtttgcaaaaaacactgccgctcttttgaatctttaagggagcatctaattggtatgctagctacacttacccaaaaaaagcatccttttttttcgagtttaagttatatatatcgtcacgttcaattttttttatttggtcactaatgtaccgcagggccacttccaaaggcagaatgtgaaagaattttcaaggaacgaggatgtgatatttgtttgtcaatccttggcaatcgaacttctctacgggctcatagagaatcatgcctctcacgtcctaataataacgtaagcaatcaattcatccaaaaaaaaaattaaaattattagagtagaataggaaaaatctatgcaagtactgataccatgttagattgtgtgactgtcttattgcagggtttattgtatcgcatggctaatttggggattcaagatgaactaagaattgataacagcagaggaagagtggttgctcttgcttgtaaaatggttggtggtggaagtgatggatctttagatctttgtgctagggtttgtctcattgatgaacatgaaagaatcctctttcattcatatatcaaaccaaacattcctgtcactaactacaggtgatccatttcaattaataatgtaaaaaaaaatcttaacacaattaataaatttcaactaatttgttataacatttttatttagttactacgttattaaacggagtaacaatatacttattgttctaaagttaatttactacataaaatttaaactcaaatattaaagcacgttctcttatttttggtctttttgcggcccattccatgacaagaacaacaaggatgtgtcatgatagtgtataatttttcttatattgacgatgtatattaacttaaactctgacgagataaatatatatgtttataggtatgaaatgacgggtataagaccagaatatttgagggatgcaatgcctttaaaaaatgtgtcaagaaaaattcaagaatttctttgcaatggggaacctatttggcaaatccgttctaaaggtggaaggtctaggattcttgttggccatggtttggatcatgatcttaaatgtttggagatggattatccagcaataaagatgaggtaaattaataattatttcatcaattatataatttaaaaatactttactgctatatagaaaaaacatgaaattaactcctactcattactattttatatattacaatcaaatgtctttggtaatctagtttacaaagtacatacacagtagcgtatattttatactaaaatatacatatacttattcatttgatatacataccgtatacattaacatatatagccaaagtatataaatagtgtatatttcgaccatatttacgtgagttaattcccttctaacattttattttattttttgtaaagggatactgcaaaatacccaccacttatgaaaacaagcaagctcagtaactccctcaagtacttgaccagagcttacctcgggtaatttatacattaaatagtgcatatataaaactttatccttaataatattattaatgtaatttgttgtttttataaaaaaataaaataaatatgaatggacaataataagggaaattgtgtgtaggtatgatattcaaagtggagtacaagatccgtatgaagactgtgtggccacaatgaaactctacatgagaatgaaattatcacaatttcacaaaaaagagaattatcctcttgctactgatccacaaaataaaaataactttgcatcttggaggcaaaatgagcttgagaggatgactcctgaccaactattggatatttcaaggtctgattattattgttggtgtttggactcacaagattattaa

SEQ ID NO: 259 - protein, 344 aa, Solanum lycopersicum
MEYRNKCAACYRQFNKMEHLVEHMRISYHSVHEPMCLICRKHCRSFESLREHLIGPLPKAECEKIFKERGCDICLTLLASRNALRTHKESCQLSRSNNGLLYRMTRLGLGFQDDLKISNSQGKVVALSCKMVGGGNDGSLHLCARVCLIDEHERILFESYVAPNIPITNYRYEISGIRPEYMRNAMPLKQVSRKIQDYLCNGEPIWQIRTRSGRARILVGHNLDHDLKCLEMDYPTIMLRDTAKYPPLMKTSKLSNSLKYLSKAYLGYEIQTGVQDPYDDCVATMRLYKRMKSQAHIRENYPLAIDPQNRNNFASWKENELVKMMPSQLLEISRSDYYCWCLDS

SEQ ID NO: 260 - DNA, 1035 bp, Solanum lycopersicum
  source 1..1035: mol_type = other DNA
atggagtacaggaacaaatgtgcagcatgctataggcagttcaacaaaatggagcatctagttgaacacatgaggatatcttatcattcagttcatgaacctatgtgtttgatttgtagaaaacattgtcgatcttttgaatctttgagagaacatctcattgggccattgccaaaggctgagtgtgagaagattttcaaggaacgaggatgtgatatttgtttgacactccttgctagccggaatgcactaaggactcacaaggaatcatgtcaactctcacgctcaaataatggtttgctctatcgtatgactaggttgggattaggttttcaagatgacctaaaaattagcaatagtcaaggaaaagttgttgctctttcttgcaaaatggtaggtggtggcaacgatggctctcttcatctttgtgcaagagtttgcctaattgatgaacatgaaagaatcctctttgaatcctatgttgcaccaaatattcccatcacgaactataggtatgaaatatcggggattaggccagaatacatgagaaatgcaatgccattgaagcaagtatcgagaaaaattcaagattatctttgtaatggtgaacctatttggcaaattcgtactagaagtggaagggctaggatccttgttggtcacaatttggatcatgatttaaaatgcttagaaatggactacccaacaataatgttaagggatacagcaaaataccctccactaatgaaaacaagcaagctgagcaactcactcaagtacttgagcaaagcttatcttggatatgaaattcaaacaggagttcaagatccatatgatgattgtgttgcaacaatgaggttgtacaagagaatgaaatcacaagctcatataagggagaattatccacttgcaattgacccacaaaatcgtaataattttgcatcatggaaggaaaatgaacttgtgaagatgatgccttcacaattactagaaatctcacgatctgattattattgttggtgtttggattcctaa

SEQ ID NO: 261 - DNA, 1860 bp, Solanum lycopersicum
  source 1..1860: mol_type = genomic DNA
atggagtacaggaacaaatgtgcagcatgctataggcagttcaacaaaatggagcatctagttgaacacatgaggatatcttatcattcagttcatgaacctatgtgtttgatttgtagaaaacattgtcgatcttttgaatctttgagagaacatctcattggtaatcttctttcttttttccttcctagcaacaagttgcaatagtattagtttgcagaagggggttcgtgggtttggacaaaaaaaataatatatatatatatatatatatgtatatgtatatatattaacctgtgaactctctaataaatttgattgacagcttagtagtaagaaaggggtggtgaaaatgattttcacgctaatggtgtggcttcaaaccccaccatcaagcatgtttgcaatatttttgtcctgaaatttacaaccccaaaattctaatcctggctcggcctccgagtctagttaactttttcttctaaattagtcatataattgtattttagggccattgccaaaggctgagtgtgagaagattttcaaggaacgaggatgtgatatttgtttgacactccttgctagccggaatgcactaaggactcacaaggaatcatgtcaactctcacgctcaaataatgtatgtatacttattccaacaacacaacgaacatcagtttattttaaaataaaaaagatataatagattttttttttcaatttctggttatttagcattaccctttctcaaatactcgtagttttatacatttgttaattttcagggtttgctctatcgtatgactaggttgggattaggttttcaagatgacctaaaaattagcaatagtcaaggaaaagttgttgctctttcttgcaaaatggtaggtggtggcaacgatggctctcttcatctttgtgcaagagtttgcctaattgatgaacatgaaagaatcctctttgaatcctatgttgcaccaaatattcccatcacgaactataggtaattgtcgtacaccagtaattagtgtattaaagtttgattaattaacataatatagacgggttgatcaaatgtttaggtatgaaatatcggggattaggccagaatacatgagaaatgcaatgccattgaagcaagtatcgagaaaaattcaagattatctttgtaatggtgaacctatttggcaaattcgtactagaagtggaagggctaggatccttgttggtcacaatttggatcatgatttaaaatgcttagaaatggactacccaacaataatgttaaggtaagtcctttaattgtcgagtttacacaacatacatgtataaataataatttgataaataagacaactaattaaaatatattttacgtagggatacagcaaaataccctccactaatgaaaacaagcaagctgagcaactcactcaagtacttgagcaaagcttatcttgggtacgtacgtacgtacgtaaatactttaaattgttaattattgtgaccttttatatactccagtttctaaatataaaaaattatatctaaattcacacgagacatttgttagtttaaccttggtactaataagaatcaatcttaattgtcttgtaattgaatagatatgaaattcaaacaggagttcaagatccatatgatgattgtgttgcaacaatgaggttgtacaagagaatgaaatcacaagctcatataagggagaattatccacttgcaattgacccacaaaatcgtaataattttgcatcatggaaggaaaatgaacttgtgaagatgatgccttcacaattactagaaatctcacgatctgattattattgttggtgtttggattcctaa

SEQ ID NO: 262 - protein, 335 aa, Cucumis sativus
HKCAACFRQFNKIEHLVDHMRTSFHSHHEPTCAICKKHCRSLDSLREHLIGPLPKQECKNIFATRGCKFCLAIFDSSYSQRLHQERCQFSPVNSGLLARFANLGIRDGSTVIDSGRTRGSGAIALACKYVGGGSDGSMDICAKVCLIDEGENVIFYSYVKPVTAVTNYRYETTGIRPEHIRDAMPVKQVQKKIQEILYNGGEKARILVGDCVEDDLKRLQIGYPSFMIRDTANYPPLMKSSKLCNSLKYLAQVYLGFDLQNGIQDPYEECIVAMRLYKRMRSQVHRKENYPMASDPQNKNNFAIWRENELQRMSPEQMLEISRSDYYCWCMDLRI

SEQ ID NO: 263 - DNA, 1009 bp, Cucumis sativus
  source 1..1009: mol_type = other DNA
gcacaagtgtgcagcttgttttaggcaattcaataagatagagcatttggtagatcatatgaggacttcttttcactcacatcatgaaccaacttgtgccatttgcaagaaacattgtcgatctcttgattctcttagagaacatctcattgggccactgccaaaacaagaatgcaaaaacatctttgctacaagaggatgcaagttttgcttggccatctttgacagttcttactcacaaagactccaccaagaaagatgccaattctctcctgtaaattctggacttcttgctcgtttcgccaacttgggaattcgtgacggttcaaccgtcatcgacagtggaagaacacgagggtcaggggccatcgcgctagcttgcaaatatgtaggtggaggaagtgatgggtcgatggacatatgtgctaaggtttgccttattgatgagggtgagaacgtcatcttctatagctatgtcaagcccgtaactgctgttacaaattataggtatgaaacaactggaattcgtccagaacacattcgagatgcaatgccagtgaaacaagttcaaaagaaaattcaagaaatcctctacaatggaggtgagaaggctaggattcttgtaggtgattgcgtcgaagacgatctcaaacgcttacaaatcggttacccatccttcatgataagggacacagcaaattatccaccattgatgaagtcaagcaagctttgcaattcactcaagtatctagctcaagtgtatctaggatttgatcttcaaaatggtatacaagatccttatgaagaatgtatcgttgctatgagattatacaagagaatgagatcacaagttcataggaaagagaactatccaatggcttctgacccacaaaacaaaaataattttgctatttggagggaaaatgagcttcaaaggatgagtccagaacaaatgttggagatttctaggtctgattattattgttggtgcatggatttgaggatttga

SEQ ID NO: 264 - DNA, 4093 bp, Cucumis sativus
  misc_difference 2473..2564: note = n is a, c, g, or t
  source 1..4093: mol_type = genomic DNA
gcacaagtgtgcagcttgttttaggcaattcaataagatagagcatttggtagatcatatgaggacttcttttcactcacatcatgaaccaacttgtgccatttgcaagaaacattgtcgatctcttgattctcttagagaacatctcattggtaatgtcactcttctaattcataattggacttcattttttaaaaaaatttggaacatacctatgtcaaccaaaatatttacaaaatttaattaaatatcatagtatttctacgatggaccgtgatagacgcacatagtggtctatcatgtctattatcgcaaatagattgtgatatatttttattatatttgtgaatatttttagaaattttgtcatttaaaataatttttctagaaattaacccaaaagtctaataaaagttacaatatattttgtatctagtactatgttaaaaattaatttctaagcagatgagttatgataaatttattgttagaatattatatttccgatcgatgaactttgagtttcatcaataaattttaaagatagtccctctctatatatatttagtttagtaaaaaactagtctctcttaactagctttttcgttattaattttgagtatatttttttctctactagtataagctgtcttcctattcaaaatataagtactaaaataaaatgaaacctaaagaatataaataatcaaatgatattttaacgtagtgtaaaaatttatagatcaagactctaacacatgtgaaataaacatcaatatttgagaaaaaaatgatgttattaggagttcgaacaccaaacttcattatctaatatattattatgttaagtatctaatatattattatgttaagagcttaagctgatgagtttactattcttacgttttcgttattgtattgttattagggccactgccaaaacaagaatgcaaaaacatctttgctacaagaggatgcaagttttgcttggccatctttgacagttcttactcacaaagactccaccaagaaagatgccaattctctcctgtaaattctgtatgaatcctaaaaaaccattctatttaatcaaacagaatgcataaatatatatatatataattcttgttgattttaaaatcttgatgttattttgctttttgggacatcagggacttcttgctcgtttcgccaacttgggaattcgtgacggttcaaccgtcatcgacagtggaagaacacgagggtcaggggccatcgcgctagcttgcaaatatgtaggtggaggaagtgatgggtcgatggacatatgtgctaaggtttgccttattgatgagggtgagaacgtcatcttctatagctatgtcaagcccgtaactgctgttacaaattataggtaagtaaaattaaattcatgtatataaatttgaagtttaatattatactccttttatttttattttttggaatttgagattcatttttccgtctaaattgtcgattttttttagaaaagtttaggaaccaaataaaaactcatttgactattttcgaacttaaaacatcaacaactttataattaatttacttcttttaaaaggaaattgaaccaataaagtaattaatttactttataatttttagaactatgtgatggaacttaaggtcaacatgtatttattattagaatttaatccctagttagaatttagtcattatagtttagaacggcatagatcaagtttaatctagtctactcccgatttattgcatcttattcaaatttttttgtcagttgatatatactttgagtgttgttggggcttcatagatataaaacaaaaaattggtggaacttagagtgaactcaagttttgtttggtttagtttaacagtactcttgataaaaccctagacaatacctaattttaataaaaataatttaccaaaccatattgacttaaattcaaactttggtcaaaccaaatttgcaatttaacctaataataataacccataaaattttattaaattttccatttctttagaaatggaattttatcaagcacattcgagatgttaaaattatatattgttttaacctttgatatgttaaaattaacattaggtatgaaacaactggaattcgtccagaacacattcgagatgcaatgccagtgaaacaagttcaaaagaaaattcaagaaatcctctacaatggaggtgagaaggctaggattcttgtaggtgattgcgtcgaagacgatctcaaacgcttacaaatcggttacccatccttcatgataaggtaaattgctcgtaataaaatttaaatttgtcgtaacctatcaacataattcattttaaaatttcatataaaaaataacaaacatgatcttctaaggatcaactatattttgcatatatatatatatatatatatatatatatatatatatatatatattatttnnnnnnnnnnnnnnnnnnnnnnnnnnnnnnnnnnnnnnnnnnnnnnnnnnnnnnnnnnnnnnnnnnnnnnnnnnnnnnnnnnnnnnnnnnnntactattattatatatatatatatatatatatatatatatatatatatatatatatatatattactttttttgttggttgaatgccagataaaatagtaacttatttttaaaaataggttgaattaggaaattcaaacttctaacatctaaacagatgttaaagttttttttttcattcctaatataagctattagtgttgttggtgaaacccttttaacatcttattgcatgtcgaagtgagctcaacagtggcagatccaaaaattttatataagggtattgaacattatataataaatacactaaaacatatttaaaaaatatatcgacgtttaatcgatgcttcaataacattcgctacatttgtagcaacaaagaaacatctataatttccacgtgattttttgtaatgtaaatatgtagatttttatggaatgttgttgagagtagaagttttgaccaatgactttgttgcatttttttctctaaatatttgttagataacaaatgagggttaggaaataaagtagggtttatagaatgatttttttttctctttttaaaaattatattccttttacgaaatcatttgaaatgaaaattattgatatttgaaataaaaactatttcaaaaaaataattgtcataagtaagaatcaatttttttttagggcacaaccactacctcccaactaaaatttaattaaaataaagtattatttaatatatattgtaatctgacacttcaaaattaatattaaaatacaataattgagaatgtgagaggcacgtgtccctttcgccccttgagctcaaaacatttaagtttggtttgatttagttttctagattttaataataagtagcgttaatctataagcttaactatttaaaaaaaaaagtaaaaaagttatcaaacaacacccttaatttgttgatttcatgcactgacccacagggacacagcaaattatccaccattgatgaagtcaagcaagctttgcaattcactcaagtatctagctcaagtgtatctagggtaagttaaccttttaagcactcgtttgtttttttaaagtcttccataaaacttatatgctattcatttttttcatttaaggattgagatccatgaaataatatataaatatatcatttgatgggtcaaattggtgaaagtaagaagtaaggcagctgatgtattacagcagtactggaaaattttccatatgtcgtttttctctatagaaaatgattaactaagaagtgtgtattgttaattgtagatttgatcttcaaaatggtatacaagatccttatgaagaatgtatcgttgctatgagattatacaagagaatgagatcacaagttcataggaaagagaactatccaatggcttctgacccacaaaacaaaaataattttgctatttggagggaaaatgagcttcaaaggatgagtccagaacaaatgttggagatttctaggtctgattattattgttggtgcatggatttgaggatttga

SEQ ID NO: 265 - protein, 349 aa, Cucumis sativus
MDHPCETLRHKCEGCFKQFNKIEHLVEHMRISFHSIHEPICSFCHKHFRYFESLREHLIGPLPKQECKNIFNARGCKICLAMFESPLQLNLHQESCQLRPINFSHENRARLGKTESGGTKGNNEAVALSCTMVGAGIDGSLNICVRVCVVDQNESLIFSTYVNPTLPITNYRYEFTGVRPEHLRDAMPLKQVQKKIQEFLCNGEQMWKIRPGSTGRARILVGHGLQEYLTSLQIDYPPIMIRDTAKYPPLMKTSKLSNSLHCLTQTYLGYSMENGKRLEGYEECVATMRLYMRMKSQVHKREEYPLASDPQNKFNFANWKQLELEKMTPQQLLQISRSDYYCWCLDSTL

SEQ ID NO: 266 - DNA, 1050 bp, Cucumis sativus
  source 1..1050: mol_type = other DNA
atggatcatccatgtgaaactttaaggcacaaatgtgaaggttgcttcaagcaattcaacaaaatagagcacttagtagagcatatgagaatctcatttcactcaattcatgaaccaatttgctccttttgccacaaacacttcagatactttgaatctcttagagaacatcttattgggccattgccaaagcaagaatgcaaaaacatattcaatgcaagaggatgcaaaatctgcttagccatgtttgagagtccactccagctcaaccttcaccaagaaagttgccaacttaggcctataaattttagtcatgaaaatagggcacgtttggggaagacagaaagtggtggaacaaaaggcaataacgaagcagtggcattgagttgcaccatggtgggcgctggcatcgacggctccctaaatatttgcgttagggtttgtgttgttgaccaaaacgagtccctcatcttttctacttatgtcaacccaacccttcccatcacaaactataggtatgaattcacaggtgttcgtccagaacacttgagagatgcaatgccattgaagcaagtccagaagaaaattcaagagtttctatgcaatggagaacaaatgtggaagattcgtcctggatctactggaagagcaagaattcttgtgggtcatggccttcaagaataccttacatctttgcaaattgactaccctcccattatgatcagggatactgctaaatatccaccattgatgaagacaagcaagctaagcaattctctccactgtttgacacaaacatatcttggatacagtatggaaaatgggaagagattagaaggttatgaggagtgtgttgcaacaatgagattgtacatgagaatgaaatctcaagttcacaaaagagaggaatatccattggcttctgatccacaaaataagtttaattttgcaaattggaagcaacttgagcttgagaagatgacaccccaacagttgttgcaaatttcaagatctgattactattgttggtgtttggattccaccctttaa

SEQ ID NO: 267 - DNA, 3425 bp, Cucumis sativus
  misc_difference 482..642: note = n is a, c, g, or t
  source 1..3425: mol_type = genomic DNA
atggatcatccatgtgaaactttaaggtgtggtctctctctatttgtgagatatgttttttgaaatattagtaatgagtaacaaagttttgttgacattatgaactcattggaattgggcaggcacaaatgtgaaggttgcttcaagcaattcaacaaaatagagcacttagtagagcatatgagaatctcatttcactcaattcatgaaccaatttgctccttttgccacaaacacttcagatactttgaatctcttagagaacatcttattggtaatacctcaaactttcatgtttcaaattcatgaattttcaagtttttcttattaattttatttttgttttaaatgaaaaaatagaaaggtgtgtggtaagcaattgatctttgtttcttattctctataatttttttaaatcaatgtgaaaaaaaaatgtatagattatatatatatatatatatatatatatatattgtatatcnnnnnnnnnnnnnnnnnnnnnnnnnnnnnnnnnnnnnnnnnnnnnnnnnnnnnnnnnnnnnnnnnnnnnnnnnnnnnnnnnnnnnnnnnnnnnnnnnnnnnnnnnnnnnnnnnnnnnnnnnnnnnnnnnnnnnnnnnnnnnnnnnnnnnnnnnnnnnnnnnatatatatatatatatatatatatatatatatttgatatccattgatttatattatatttgttacatcctttttaacagggagaatgtttccattttggttatggttttatgtaatatacaaacttaattatattatttaatatgacaacatttaatttatatagtcttttttgctaaattgagcacataagtcgattaacatataaatgtgtttataactatgtgttattgaaaaaaaatattctatttcctaatgttttcggttctgcgtataaatttcatattttcagggccattgccaaagcaagaatgcaaaaacatattcaatgcaagaggatgcaaaatctgcttagccatgtttgagagtccactccagctcaaccttcaccaagaaagttgccaacttaggcctataaattttgtaagggttcgtcgtgttttacgcattttttatatctccatgtcttttactcgatttatgtatttgaaagtatatgaactaaatgtgtttccaattaaagtttaatgatcaaattataacttttatgaaagtttaagaattgtcggtatttttttaacatgaaaaactaactttttagaaaaatctaaaaataggttgcaacaagtaacaaattattatcaaataattgattgagatgcatgaaaaatttatattaatcaaagtaagcattatatctgatacttgttatatcaattttaaatttagacgttcacaattttctaaactatatgtatgaaaaggagaaataaaacttcacattaatgttaaaagaattttacccctattaaaagaaaaagagtttattatactctcatggtgctagaaatcttatttcgactgattgcagagtcatgaaaatagggcacgtttggggaagacagaaagtggtggaacaaaaggcaataacgaagcagtggcattgagttgcaccatggtgggcgctggcatcgacggctccctaaatatttgcgttagggtttgtgttgttgaccaaaacgagtccctcatcttttctacttatgtcaacccaacccttcccatcacaaactataggtatatattcaatttctccttcttcttttttacagtaataactattgttgtaatttcttctgcttttttgtttttgttttttttccattttaataaagaaacacagtaataagattatatttagaccccgtctgataaatttttagtttttgaaaatccaaagtccttcaagaattgtttttgcatcttgaagactactatctatttatcacgaatagttagagagtgtgatattttattatatttgtaaataatttgaaaagatttgtgatttaaaacaaaattaggttttgatattaattagattgtgtgggtgtaggtatgaattcacaggtgttcgtccagaacacttgagagatgcaatgccattgaagcaagtccagaagaaaattcaagagtttctatgcaatggagaacaaatgtggaagattcgtcctggatctactggaagagcaagaattcttgtgggtcatggccttcaagaataccttacatctttgcaaattgactaccctcccattatgatcaggtaaaatgttttatccttattaaatatttgactgcatctcaagctacatgcatatccatttttaggccgtttcttaacaaggaaaatattttttaacatattttctctacattcttaacaaggaaaataaaagtcgaatttctaatgaatagtaatttatttaaactgcagggatactgctaaatatccaccattgatgaagacaagcaagctaagcaattctctccactgtttgacacaaacatatcttgggtaaagttttccacatgcataacccctgcctcccccaataatattgttatttttttcttccttcactagctagatacctcaaaagtagtagtaaaaatatatatatttggtaacaattttgttttagatatgaaaaatagatatcaatccataaaaaaaatatatgttaagatgaaagtagggtttacaagagtaagtttttaaaatgaaaaaataaataggacagcttagatgatttattgttaaatcaatttaattaaagcttaagctggtggtcaactgggataagcactttaacagtcctctcactttttcttttttttttatttcatggtcatgatacagagcagaaaatcaaattgctaatcttccacgatggtagatttagatagaaaattatattaaataaaaatttaatttttaatatatcatgtcaaatcatcaatcaactcgaataattaaattagttaatggattttgagtaatttaattatatatacaatactctaacatttataaacaaattaaaggtaactaaacaaaatattttagaatgttaatcaataaatgtattagaatagatttgttggaatgaattaaaaaatttaataagtttataaactttaaacattttacgtctaattatatggtattgtatattttttggaattttgttattcagatacagtatggaaaatgggaagagattagaaggttatgaggagtgtgttgcaacaatgagattgtacatgagaatgaaatctcaagttcacaaaagagaggaatatccattggcttctgatccacaaaataagtttaattttgcaaattggaagcaacttgagcttgagaagatgacaccccaacagttgttgcaaatttcaagatctgattactattgttggtgtttggattccaccctttaa

SEQ ID NO: 268 - protein, 342 aa, Lactuca sativa
MDSETQRNKCAACYRQFNKKEHLVEHMRISYHSVHEPMCGICGKRCRSFESLRDHLIGPLPKVECERVFRDHGCTICLTVLNSPNSLRVHQDRCQLSRGNNGVLHRFANMGIHDDLRIDSGKTRAVALACKMVGGGSDGSLDLCARVCIIDEYENILFHSYVKPQLPVTNYRYETTGVRPEYLRDAMPLRHVQRKIQDFLCNGEPIWKIRSRGGKARILVGHGLEHDMKCLELEDTAKYPPLMKTSKLSNSLKYLTKSYLGYDIQNGIQDPYDDCVATMRLYRRMRSQAHRMEDYPLATDSQNSNNFASWRQGELERMSPNELLAISRSDYYCWCLDSKDVA

SEQ ID NO: 269 - DNA, 1139 bp, Lactuca sativa
  source 1..1139: mol_type = other DNA
atggattcagagacccaaaggaacaaatgtgcagcatgctataggcagtttaacaaaaaggagcacttggtggaacacatgaggatttcatatcactcggttcatgaacccatgtgtggaatttgtgggaaacgttgtcgctcatttgaatctctccgtgatcatcttataggaccattgccaaaggttgaatgtgaaagggtgtttagagaccatggatgtaccatttgcttaaccgtccttaatagcccaaactctctaagggttcaccaagatagatgtcaactatcacgtggaaataacggtgtactacatagatttgctaacatgggaattcatgatgacttgagaatcgatagtgggaaaacaagggcagttgcacttgcttgcaaaatggttggtggtggaagtgatggttctttagatctttgtgcaagagtttgtatcatcgatgaatatgagaacatactctttcattcatatgttaagccacaacttcccgttacaaactataggtatgagacaacaggcgttcgaccagagtaccttagggatgcaatgccactaagacatgtacaaagaaaaattcaagattttttgtgtaatggggaaccaatatggaagattcgctcgagaggtggaaaggcgaggattcttgtaggacatggtttggaacatgacatgaaatgtttggaacttgaggatacagcaaaatatccaccactaatgaagacaagcaagctcagcaactcactcaagtacctaacaaaatcttacctagggtatgatattcaaaatgggatacaagatccttatgatgattgtgttgcaacgatgagactttatagaagaatgagatcacaagctcatagaatggaggattatcctctggctacagattcccaaaacagtaataactttgcttcatggaggcagggtgagcttgagaggatgagtcctaatgaattgttggcaatctcaaggtctgattactattgttggtgcttagatagcaaagatgtggcttaaaatgaagggaagaacaaggaaaatattttagtgggtgaaaaaaaatagctaaacttatttgaaactaataaaatataaatggaataaacatggatacacatatatgtttg

SEQ ID NO: 270 - DNA, 1797 bp, Lactuca sativa
  source 1..1797: mol_type = genomic DNA
atggattcagagacccaaaggtagtaaccatatataaaatacaaaatataaaatatactcacattgtcatagaaaaactaacacacaagttcttgaaaatactacattttgatcttattattaacatgtttttcttgtttactaggaacaaatgtgcagcatgctataggcagtttaacaaaaaggagcacttggtggaacacatgaggatttcatatcactcggttcatgaacccatgtgtggaatttgtgggaaacgttgtcgctcatttgaatctctccgtgatcatcttataggtattacattactattattatatattttaactactatactctatacatttatggatatttagttatttacttatattaattacttctttaattctcaggaccattgccaaaggttgaatgtgaaagggtgtttagagaccatggatgtaccatttgcttaaccgtccttaatagcccaaactctctaagggttcaccaagatagatgtcaactatcacgtggaaataacgtaacaaatcatatccttaaacttacaaaaaatcatttttttgatgtatatatatatgtataattataattaatcatatatgttccagggtgtactacatagatttgctaacatgggaattcatgatgacttgagaatcgatagtgggaaaacaagggcagttgcacttgcttgcaaaatggttggtggtggaagtgatggttctttagatctttgtgcaagagtttgtatcatcgatgaatatgagaacatactctttcattcatatgttaagccacaacttcccgttacaaactataggtgctatatattttgccatagttttaatttttttaagggtctatagacatataatcatataaatatataaagttactctttgccatcttttcctacgtatgtatatataatcttatttaattaaaaaaattcataggtatgagacaacaggcgttcgaccagagtaccttagggatgcaatgccactaagacatgtacaaagaaaaattcaagattttttgtgtaatggggaaccaatatggaagattcgctcgagaggtggaaaggcgaggattcttgtaggacatggtttggaacatgacatgaaatgtttggaacttgagtatcctttagtaaagataaggcatgtatctttaaggaatttattattactatcatctactttaataacttatgaactaagagtaatatgcacttgttatttgatagggatacagcaaaatatccaccactaatgaagacaagcaagctcagcaactcactcaagtacctaacaaaatcttacctagggtaatagatattcatatattgcctttatttttaaaagtttgacatgtacatgtgaatttgtgatatgttacttattgttagtgatggaatttcttattttataggtatgatattcaaaatgggatacaagatccttatgatgattgtgttgcaacgatgagactttatagaagaatgagatcacaagctcatagaatggaggattatcctctggctacagattcccaaaacagtaataactttgcttcatggaggcagggtgagcttgagaggatgagtcctaatgaattgttggcaatctcaaggtctgattactattgttggtgcttagatagcaaagatgtggcttaaaatgaagggaagaacaaggaaaatattttagtgggtgaaaaaaaatagctaaacttatttgaaactaataaaatataaatggaataaacatggatacacatatatgtttg

SEQ ID NO: 271 - protein, 368 aa, Lactuca sativa
MEEFEPNHLKTPMVSTSTRHKCAACFQQFKKKENLVEHMKKSYHSVHQPKCGVCHKHCKSFESLREHISGPLAKAHCSSIFAQNGCHLCLKVFESPVSVDEHKELCLLTAPPPLGTMNIPYTEYEALEDENYMSKYPEAVAINCQMVGCGIDGSVDLLARVCLVDEEDNMIFHTYVEPQLSVTDYRYEVTGITEEQLKRDGMSVKEVREKISQILYNGESIGKARLDGGKAKLLVGHNLDHALDCLLMNYPENLLRDTATYRPLLKTNFMSHSLKYLTKTYLGYDIRSGSHDTFQDCVSVMRLYKRMRSQEHQDEETAKQNHLNFDARKSKDHDLQNMSPDELFRISTSNYQCWCLDSQPRTAEFYGV

SEQ ID NO: 272 - DNA, 1429 bp, Lactuca sativa
  source 1..1429: mol_type = other DNA
ggcgattgtgttttgtccaccgttaccaaccagagccctctcttgatcaaacccaaaccctaattccacaaataaaaactccgctctgcattgtttacggcgattccggcgcttaatttcttctgttccctccattttgagccgttgtgcaatggaggagttcgagccaaaccatctaaaaaccccgatggtctctacaagcacaaggcacaaatgtgcagcatgttttcagcagttcaagaaaaaagagaaccttgttgaacacatgaagaaatcctatcactcagtgcatcaacctaaatgcggtgtttgtcataaacactgcaaatcatttgaatcattaagggagcatatatcaggtccattagccaaagctcactgctcaagtatatttgcacaaaatggttgccacctttgtctgaaagtctttgaaagccctgtttctgttgatgagcacaaagagttatgcctcctgactgcccctccccccctcgggacaatgaatattccctacacagaatatgaagccttagaagatgaaaactacatgagtaaatatcctgaagcagttgctatcaactgccaaatggttgggtgtggtatcgatggatcagttgatctattagctcgagtttgccttgttgatgaagaagataatatgatattccacacgtatgtggaaccccaactatctgtaactgattacagatatgaagtaacgggcataacagaagagcagttaaaaagagatggtatgtcagttaaggaagtgagagaaaagatttctcaaattttgtacaacggagaatcaataggaaaagcacgcttggatggtggaaaagctaaacttcttgtgggccataacctggaccatgctttggattgcttgttaatgaactatcccgagaatttgttaagggatactgcgacatatcgtccactacttaaaactaatttcatgagccactctctcaagtacctcaccaagacatatctagggtacgatatcaggtcagggagtcacgacacgtttcaggattgtgtgtctgtaatgagactgtacaagcgtatgcgctctcaagaacatcaagacgaagagactgcaaaacaaaaccaccttaattttgatgctcgaaaatcaaaggatcatgatcttcagaacatgtcaccggatgaactctttcggatttcaacttcaaattatcaatgttggtgtttggactctcaaccacgtaccgctgagttctatggtgtttgaagaaaccctaaacatatttatatatcataaaaggaaaatggttttgttaaatatcaaaaggaattcactgaaataaaattatacgactgaatatttgtattggttctgaaaacttcaaaagacgaaaagaaaatcagacacgaagtgcaagtatctctgcccaagctcaaa

SEQ ID NO: 273 - DNA, 3968 bp, Lactuca sativa
  source 1..3968: mol_type = genomic DNA
gcgattgtgttttgtccaccgttaccaaccagagccctctcttgatcaaacccaaaccctaattccacaaataaaaactccgctctgcattgtttacggcgattccggcgcttaatttcttctgttccctccattttgagccgttgtgcaatggaggagttcgagccaaaccatctaaaaaccccgatggtctctacaagcacaaggttctctgatttttatctcttcctttgtattccttcaatctccatcgttgcttatatgctttatcaatttacattgctttcacactgcatttgtttggttcccggtaatcatgtacgcatgctaaaatttattactttttgtatctgatatcattttctttaattggttgacaacttgacatatcaaaatgttctaaagctttgcccttcgcctacttgaacttttatcaagtgttaaagcagttcacaccatgttagtttataagatggctatattaatacctgttttctccaggcacaaatgtgcagcatgttttcagcagttcaagaaaaaagagaaccttgttgaacacatgaagaaatcctatcactcagtgcatcaacctaaatgcggtgtttgtcataaacactgcaaatcatttgaatcattaagggagcatatatcaggtgtgatactttgagggtgtttggatgtgcggttttaaagtgatcattgtgattcaagaatcagaatccgaattgaaatcacagtcatttgattaaagtgagtgatagtggcctttggttcacagaatttggaattcaactccattgcactcctggtttttgcaatgagtatgaaactgaattccatttgaatttacaaaatcctttgatcatctgattttaatgtcccattccatggaattcaattcctcgcatttactcctttttcaaaatactcaaatatccttttaaccgtaagttcaatagcaaatgtttctcactcatgatttttcttccattttgggccaaccgaactcgtgacacaattcaattccttcatattccatttcctttgacaaattcaagtttctcccaaaacatttctcgaaccaaacttcccctttttaatcagtttttttatgtgcttctgttttgtcctacataattaaaattataatcatttgcaagacactatgaaactgtcaaatggcaataatcactttatcatcgcatctaaacactcctttaacataatctatccattaaatttttcattcttatttacatttttgtatggattatgtaggtccattagccaaagctcactgctcaagtatatttgcacaaaatggttgccacctttgtctgaaagtctttgaaagccctgtttctgttgatgagcacaaagagttatgcctcctgactgcccctccccccctcgtaagttgatatggaataatcttttcgatgatgagggcattaacgtcttttgcacaagcgagagatagagagcaagtccatgtcccatcttttttggtggacaagaaatgcagtgtcatgactcatgagtctcagtttcaatctaatacacttgacttacatttattttattaatgtcttgcaggggacaatgaatattccctacacagaatatgaagccttagaagatgaaaactacatgagtaaatatcctgaagcagttgctatcaactgccaaatggttgggtgtggtatcgatggatcagttgatctattagctcgagtttgccttgttgatgaagaagataatatgatattccacacgtatgtggaaccccaactatctgtaactgattacaggtacttttgtcttctgtgttgcatcttgttcatttttcttctagaattcgatgactgcatgtttatgtgaaaatgggtcaattcaggttatattttctcgataacaggtcaaatgggttaaactaaaacattttgctaaaaatggtaacatgtcaaatggtttaaaagttttacactttacagccttctaagttatttcattaaaaaaatcggatattgcattttaatatcgtccttgtaattatatttcacttactaattctttacaaatcagtttcggttttagtgaaactggttcataaagttgatgtttacatgaattgtgaaatagatatgaagtaacgggcataacagaagagcagttaaaaagagatggtatgtcagttaaggaagtgagagaaaagatttctcaaattttgtacaacggagaatcaataggaaaagcacgcttggatggtggaaaagctaaacttcttgtgggccataacctggaccatgctttggattgcttgttaatgaactatcccgagaatttgttaaggttttctatattccatttttttctcttatcaagtttttctaatatgaaacatgtattcagttatagtattgtacttcagtttctgtctttttttttttttttaaatctaccgaatcatagcaatgaagattgctttgaatatgaatgtcattcctataattgggtagatttgtccaaagtacaaaatgttgtaataagaagaaatgaaagtgaattaatggaagtacgttgctatttcttgcatctaacactttacatttaccttaaaagatcagtattgttgtagcaacttgccaattccttgctttttataaaatctaattatttcggcttttaatggtcaaaaaatctgaatcagatttgccatcgctacaaaagttgggggcatctgctgcctaagcataaataaataaataaatttagattgagcatgtttttgttcaaatgctgtttttctgtgtgtagggatactgcgacatatcgtccactacttaaaactaatttcatgagccactctctcaagtacctcaccaagacatatctagggtaagttgcttgattagggtatttatttattttttatttttatatatgaataatcttaacacgaatcatgagttttagcatacttaattttgttttatctgatccacttctactcatgtcacccaaatatgggaaattttatattggtcatgagctcttttatagaaaatggtttctagattacaaaatgttccatcaaattagaaaaccataaaaatgccattcaaaaaaaaaaaaaaaaaactataaaaataggaaagttggtagcaaataatgaaatctgagcaagtgaccaacaaatagttgtgatttagttttctaaaatgggaaggaaatagttacccctaaattcgcccaaactaagccgtcattatatgtattatgtaatgtgagtggtttctagattacaaaatattccatcaacaaaaccttacccatttgacttgtcggagataaaagaataagatatatcctattgaagctcatttttcattctttctttctgtgtgggggtaccacacgttgtctgtacatatattttttttttttaaaaaaaaaaaattgaccaaagttacgactgtcctgtttactttgaacttatgtgatttttttataacacaacacaaatttatgttttcaggtacgatatcaggtcagggagtcacgacacgtttcaggattgtgtgtctgtaatgagactgtacaagcgtatgcgctctcaagaacatcaagacgaagagactgcaaaacaaaaccaccttaattttgatgctcgaaaatcaaaggatcatgatcttcagaacatgtcaccggatgaactctttcggatttcaacttcaaattatcaatgttggtgtttggactctcaaccacgtaccgctgagttctatggtgtttgaagaaaccctaaacatatttatatatcataaaaggaaaatggttttgttaaatatcaaaaggaattcactgaaataaaattatacgactgaatatttgtattggttctgaaaacttcaaaagacgaaaagaaaatcagacacgaagtgcaagtatctctgcccaagctcaaa

SEQ ID NO: 274 - protein, 324 aa, Vigna unguiculata
MRISYHSVHEPTCGICRKHCRSFESLREHLIGPLPKQECRDMFAYRGCKFCLKVFDSPNSRRIHQEKCQHSGTNAGIIGRFSNLGLRDNLAISGGVRGPQVVALACKMVGGGSDGSLDLCGRVCLIDEHENIIFHSYVKPPIPVTNYRYETTGIRPEYLRDAMPMKQVQRRIQDFLCNGEPMWTIRARGGRARILVGHGLDHDLECLQIEYRTEKIRDTAKYPPLMKTSKLSNSLKYLTQTYLGYDIQVGIQDPYDDCVATMRLYMRMRSQIHRTQDYPLVSDPQNRNNFASWRQSELERMTPEQMLEISRSDYYCWCLDSLYP

SEQ ID NO: 275 - DNA, 1714 bp, Vigna unguiculata
  source 1..1714: mol_type = other DNA
gaatgctataccctaccaacaaactcatctgcaaggtagagagcagaggaagcaagcatggccaaagataaagaaaaagtaaaaggggaatcccaaattaatatactgaataattcttagggaattgtccgtttatgcaagttggggcaattcttacctctaccctttctctataaataccattccactccacctttgacctcaacttcaactctttcttgaaagttatacatacatcactataaacaaatcatggattgcagaatggagagtgcagaaactcacaggttttgtttctgacatccatgcacacacacatcacatatacaagcctgcatgtgcatcttaactctcttaactcatagttaaaacacacatggatatgtgtaatatatagcttttgttactgtaggaataagtgtgcagcatgcttcagacagttcaacaaactggagcaccttgtggagcacatgaggatctcataccattcggttcatgaaccaacctgtggcatttgcaggaaacactgcaggtcatttgagtctctaagggaacatcttataggtccattgccaaagcaggaatgcagagatatgtttgcctatagagggtgcaagttttgcttgaaagtctttgacagccctaattctcgcaggattcaccaagaaaaatgccaacactctgggacaaatgctggaataattggtcgcttttcaaacttgggacttcgtgataatttggccattagtggtggagtaagaggaccacaagtagttgcattagcatgtaaaatggttggtggtggcagtgatggctcactagatctctgtggaagagtgtgcttaatcgatgagcatgagaacataatcttccattcttatgtgaagccaccaattcctgtcacaaactacaggtatgagaccacaggcattagaccagaatacctgagggatgcaatgccaatgaaacaagttcaaaggaggattcaagactttctttgcaacggtgaacctatgtggacaattcgagcaagaggaggaagagcaaggattcttgtgggccatggtttggatcatgaccttgaatgtctgcaaatagaatatcgaacagaaaagataagggacactgcaaaataccctcctctgatgaaaacgagcaaactcagcaactcgctcaagtacttaacacaaacatatcttgggtatgacattcaagttggaattcaggatccttatgatgactgtgtggcaactatgaggctctacatgagaatgagatcccaaatacacagaacacaggattaccctttggtgtctgacccacagaacaggaacaattttgcttcgtggaggcaaagtgagcttgaaagaatgactcctgaacaaatgctggaaatatcaagatctgactactattgctggtgcttggattccttgtatccctgaatatgaggaagcaagtacacaaaatcagaacctcatatgaaccacagggaattggtgaacacaatacccattcaaccgatatacatcaataactacgtactaaaagtaacaataaagtgcaccaaagttgtatctttctactagttaataatacgccacttaagcagaagctagccttacactgctgtcatagtgctagcaccttagaggcattgatgttatgcatgaatatactttattaatacaaagaataatagagctttcattac

SEQ ID NO: 276 - DNA, 2469 bp, Vigna unguiculata
  source 1..2469: mol_type = genomic DNA
gaatgctataccctaccaacaaactcatctgcaaggtagagagcagaggaagcaagcatggccaaagataaagaaaaagtaaaaggggaatcccaaattaatatactgaataattcttagggaattgtccgtttatgcaagttggggcaattcttacctctaccctttctctataaataccattccactccacctttgacctcaacttcaactctttcttgaaagttatacatacatcactataaacaaatcatggattgcagaatggagagtgcagaaactcacaggttttgtttctgacatccatgcacacacacatcacatatacaagcctgcatgtgcatcttaactctcttaactcatagttaaaacacacatggatatgtgtaatatatagcttttgttactgtaggaataagtgtgcagcatgcttcagacagttcaacaaactggagcaccttgtggagcacatgaggatctcataccattcggttcatgaaccaacctgtggcatttgcaggaaacactgcaggtcatttgagtctctaagggaacatcttataggtaataataatctttcttattaattgttgagcaaattgaagttgatggagtttcatattttttgaatagataatgatctattgattgatgatcattgtgaattttttataaatctgcttttccaggtccattgccaaagcaggaatgcagagatatgtttgcctatagagggtgcaagttttgcttgaaagtctttgacagccctaattctcgcaggattcaccaagaaaaatgccaacactctgggacaaatgctgtaaaacttttgactttgaatttcctgttacatgataaaaaaatatgtgcagttaatatacatggaaacaagaattgtatattttttattattaatgctaaaaattgaaaatgttttggaattattcattgcgaattcctaacttttggtgcacattattacagggaataattggtcgcttttcaaacttgggacttcgtgataatttggccattagtggtggagtaagaggaccacaagtagttgcattagcatgtaaaatggttggtggtggcagtgatggctcactagatctctgtggaagagtgtgcttaatcgatgagcatgagaacataatcttccattcttatgtgaagccaccaattcctgtcacaaactacaggttggacaattaaacttagtttttggagagtttaaccttatatatatatatagctggtgtagtgaatggagctactgattcattgacaggtatgagaccacaggcattagaccagaatacctgagggatgcaatgccaatgaaacaagttcaaaggaggattcaagactttctttgcaacggtgaacctatgtggacaattcgagcaagaggaggaagagcaaggattcttgtgggccatggtttggatcatgaccttgaatgtctgcaaatagaatatcgaacagaaaagataaggtaaatcattcaatttcaaatttaggttgtctatcatacatatctcagtcaaacattctcttcagaaatacttgtaacttcatttatggtaagttaaataacacttttcattagaccctacgggttacagtgacaaagaagacatcttgttcttgttgtataacttaatttgttgatttgaagtgctttaatcatccctgaaactaatatatggtgtagaacaagcacatataggtttactactttaacactcatattcaaatattgacataaaagtccttattgaataatcagggacactgcaaaataccctcctctgatgaaaacgagcaaactcagcaactcgctcaagtacttaacacaaacatatcttgggcaagtatcttttacaattttcttacacaagatgcaatttttatggagaatgtttgaagattttgaggaacatatgcatgcaggtatgacattcaagttggaattcaggatccttatgatgactgtgtggcaactatgaggctctacatgagaatgagatcccaaatacacagaacacaggattaccctttggtgtctgacccacagaacaggaacaattttgcttcgtggaggcaaagtgagcttgaaagaatgactcctgaacaaatgctggaaatatcaagatctgactactattgctggtgcttggattccttgtatccctgaatatgaggaagcaagtacacaaaatcagaacctcatatgaaccacagggaattggtgaacacaatacccattcaaccgatatacatcaataactacgtactaaaagtaacaataaagtgcaccaaagttgtatctttctactagttaataatacgccacttaagcagaagctagccttacactgctgtcatagtgctagcaccttagaggcattgatgttatgcatgaatatactttattaatacaaagaataatagagctttcattac

SEQ ID NO: 277 - protein, 376 aa, Vigna unguiculata
MRFDLPFDMDAEADSSQNPTPRHKCSACYKQFKKKEHLIEHMKTSNHSVHQPACGVCQKHCKSFESLREHLTGPLPKGVCSKTFSQRGCQLCLVLFDSPGSLIAHRQTCRLSAPTRLGTKDLTYIDSQFDCQDSSDENHAGRGTGGTVAMDCEMVGGGSDGSLELCARVCLVDEDENLIFHTYVRPLMTVTNYRYDITGLTEEHLRNAMPLYEVREKVLKILYNGESIGKVRLNGGRAKLLVGHDLAHDLDCLNMNYPDHMLRDTAKYRPLMKTNLVSHSLKYLTRTYLGYDIQSGTHDPYEDCISVMRLYKRIRAQIHPEEEEDHGTSTPSNRIVGMPDCWRSKELDNLTPDQLYAMSRSDYKCWCLDLRSKLPT

SEQ ID NO: 278 - DNA, 1871 bp, Vigna unguiculata
  source 1..1871: mol_type = other DNA
aaatattagtttaattgaatgttaaattaaaagtataccaaatcaggatttgatttgtgatatttggtttggggtgactgctccacttgctgcctacacagtagcacggtgcgtcttgactcaaagcagtggttgcagcttcttctttggtggtgttagggttttggagtagccgtttacaccatcgaaattttcgtgtacctatgtacgacaaaatgttgtgattcttctatcgactcctctcgctaacaggcaaaatacaagtcgtttcatcgtatctgcgtcacaccaaacctagctgtgcatgcgttttgatttaccatttgatatggacgccgaagcggactcaagtcaaaaccctactccaagacacaaatgttcggcatgctataaacaattcaagaagaaagagcatctaattgagcacatgaaaacctcgaaccattccgtccatcagcctgcgtgtggagtctgtcaaaaacactgcaaatcttttgagtctctgagggaacatcttactggtcctttgccaaaaggagtttgttcaaagactttctctcaacggggctgtcaactttgcttggtactatttgatagtcccgggtctctcattgctcacagacaaacatgtcgcttgtctgctcctactcgtcttggaactaaagatctgacctacatagattcccaatttgactgtcaagattcttctgatgaaaaccatgctggcaggggcactggaggaacagttgcaatggactgtgaaatggttggtggtggaagtgatggttctctggaactttgtgcaagagtatgtttggttgatgaagatgagaacttaatctttcatacatatgtaagacctttaatgactgttactaattacagatatgatataactgggttgacagaagaacatctcagaaatgcgatgcccctttatgaagttcgagaaaaggtattgaaaatactatacaatggagaatccattggcaaagttcgactaaatggtggaagggccaagcttcttgtggggcatgacttagcacacgatttagattgcttgaacatgaattatcctgatcatatgctaagagacactgcaaagtaccgtccgttgatgaagacaaacttggtcagccattcgctcaagtatctcacccgaacatatcttggttatgatatccaatccggcactcatgacccgtatgaagattgtatttctgtgatgagactatacaaaagaattcgagctcaaattcatccagaggaagaagaagaccatggaacatcgactccgagtaacaggattgttggcatgcctgattgctggagatccaaggaacttgacaacctcactccagatcaactctatgccatgtcaagatcggattacaagtgttggtgcttggatttgaggtcaaaattgccaacctgaatttatttcatcattaaatttgtccgcagcatcatatcataatgcttatttcttcagaaactatgggaatgggctgctaaaatattttgcagtgatattttcagtgcatatctttctaacgcatcgtgtgatgctcgggacaagaaaactgttgagaaaaagataggtggttatgatgcttttgtgaatatctaacttttggttcaaaccaaataaaggcgaccttttttagaatcaagactttcctacctttctcatcataataaaggctaccgacacaaacgtaaactgatttaaggcttgttctagatccaatttcaacggagccacttagatctaagttgctgattggtacaaagagttttcattttcaaatataaacatgttaagttactatttagtttcctttcaagaaatatattttctttctttacga

SEQ ID NO: 279 - DNA, 4248 bp, Vigna unguiculata
  source 1..4248: mol_type = genomic DNA
aaatattagtttaattgaatgttaaattaaaagtataccaaatcaggatttgatttgtgatatttggtttggggtgactgctccacttgctgcctacacagtagcacggtgcgtcttgactcaaagcagtggttgcagcttcttctttggtggtgttagggttttggagtagccgtttacaccatcgaaattttcgtgtacctatgtacgacaaaatgttgtgattcttctatcgactcctctcgctaacaggcaaaatacaagtcgtttcatcgtatctgcgtcacaccaaacctagctgtgcatgcgttttgatttaccatttgatatggacgccgaagcggactcaagtcaaaaccctactccaaggtcaaactgctgcgcttcacttttaatctttcttttgtttttgtttgttccatcatggttgattaccgtattgcgttgatcagaaagtcgaaccttgtaatgaaagaatttagaaggattttaaaatcaaatccaaatttattgtgtttttaaattagttattactgcattttgttctctgttgttttttagaagattctcttgtgtgaacgaatattctggttagtttttaatcggtttgtggggactctaatgtgtatctgatatatataattgcctgagttttctatttacagtgactaattagtatctgcaatatagtgattgaggaaatgttccgtgcttctgagtagaataatatatattgaaccagtgcactaagttttttttattcctctggtataactgttcttttgctagtttgtttgaagaatagctggtttcttcctacagacacaaatgttcggcatgctataaacaattcaagaagaaagagcatctaattgagcacatgaaaacctcgaaccattccgtccatcagcctgcgtgtggagtctgtcaaaaacactgcaaatcttttgagtctctgagggaacatcttactggtaagtcatttgtgcattcaatctgtgctgtcgacactgtttattgcttccatgttttatgctcattgtttatattttcttgttccttttttaactatgatttaggtcctttgccaaaaggagtttgttcaaagactttctctcaacggggctgtcaactttgcttggtactatttgatagtcccgggtctctcattgctcacagacaaacatgtcgcttgtctgctcctactcgtcttgtaagttgataattgacaaccttgagcatttataaaatgaataggtttcttgtataatttgttatctattgggattgagattaggaagtttatgttatgtctggaactgttgcagggaactaaagatctgacctacatagattcccaatttgactgtcaagattcttctgatgaaaaccatgctggcaggggcactggaggaacagttgcaatggactgtgaaatggttggtggtggaagtgatggttctctggaactttgtgcaagagtatgtttggttgatgaagatgagaacttaatctttcatacatatgtaagacctttaatgactgttactaattacaggtacttttaatttgcttctttgttttcttttcttttacaaattacgttttttaggtttgatagggagaaggaaatgtaaaggagggagataggatagaaatatcaatgtttcactatttttttgggagcagaaatagggacgaggaagtctttcgtatgggacccttctctcaaattggcatgaaataggggggagagatcatgtctatttttcattttttttttcggactttcttgaaaagttaactaacgtttttatgacaaaaaaatataaataataaataataaataatttaatgttgagaataatagagataaatatatattttttggattaaattagtacaaggatatttcatataatttatttacttttcattctctgtttcaatcatctaaacaaatgaggcaaatttctccacttctcttatttttatcaacccaaacaaacaacatatttttcaactacatttatctttatttctatccttcatatttctttattcatttctattcccaaaatcgcattattctcaatgaaaattgagaaagggaaaagagtgtaggggttgattttatttccatattttcagatatgatataactgggttgacagaagaacatctcagaaatgcgatgcccctttatgaagttcgagaaaaggtattgaaaatactatacaatggagaatccattggcaaagttcgactaaatggtggaagggccaagcttcttgtggggcatgacttagcacacgatttagattgcttgaacatgaattatcctgatcatatgctaaggtagattcttcttgagtaacttaaattgtgctaaatcttgctcggcagaattattcttgaccacactcttgcactaatttttccactttaaggatttatcatgatgatgaactaaacaattgttagaaatccctgaatttcttctgtttttctcctttttattatcatcttatataaggtattatgctaaacatgtttccagacttaaaagatctatctattcagaaccttttttcattattatattggatcatgcccagattgatggaaatatctccttgaatgtactgtttgttgttcgagagcagatctttgtaattattgcactcatcttttgcctatgcttttatgttgcattgaagagacactgcaaagtaccgtccgttgatgaagacaaacttggtcagccattcgctcaagtatctcacccgaacatatcttgggcaagttaattcttaactcaaatctttttctgtttgaaacttcttcttccagcttatagttttccttgtattttaaaagtcaaattacaattgttcaatggctatcatttcaatttgcccaggatcattgtagattctatgaatgatacttctttctatactaaaacaaaatgaaattggtgatcaacatttttttatgttgagtacgactaaactaattttgaaggacgtattcatgttgattgtcaaatataaaatgttataaactaaaacaagtttagttataaggttttatttttttgtggtttttactcttcacatttcggtaccaaattttaaatccaaacatcctatcctgaatcaatgagacaacagtggtggtggtggtggtctgacggtgctaacgagggaaattgtgacgacagtggtaaactggtggcaattaggaggtggtgggtgatagttctagtgatgacagtttacatggatggttgaggagggatgcgagatactgaatagcttgttcttcatttctttatactaaaagccatcataaagcaaaaccttatttttaaaggcagataaaagtatttcaaaaccaactaaaaatcaattcagctccattttagtcaaatgaattttgttttgaatttttatttgaaagtccaaatttaaatacttacctgtttaatcttaaaattacgatagttaactgatgacaataattttctattgtttttgctttacagttatgatatccaatccggcactcatgacccgtatgaagattgtatttctgtgatgagactatacaaaagaattcgagctcaaattcatccagaggaagaagaagaccatggaacatcgactccgagtaacaggattgttggcatgcctgattgctggagatccaaggaacttgacaacctcactccagatcaactctatgccatgtcaagatcggattacaagtgttggtgcttggatttgaggtcaaaattgccaacctgaatttatttcatcattaaatttgtccgcagcatcatatcataatgcttatttcttcagaaactatgggaatgggctgctaaaatattttgcagtgatattttcagtgcatatctttctaacgcatcgtgtgatgctcgggacaagaaaactgttgagaaaaagataggtggttatgatgcttttgtgaatatctaacttttggttcaaaccaaataaaggcgaccttttttagaatcaagactttcctacctttctcatcataataaaggctaccgacacaaacgtaaactgatttaaggcttgttctagatccaatttcaacggagccacttagatctaagttgctgattggtacaaagagttttcattttcaaatataaacatgttaagttactatttagtttcctttcaagaaatatattttctttctttacga

SEQ ID NO: 280 - protein, 348 aa, Phaseolus vulgaris
MDCRIESAETHRNKCAACFRQFNKLEHLVEHMRISYHSVHEPTCGICRKHCRSFESLREHLIGPLPKQECRDIFSYRGCKFCLKVFDSPNTRRIHQEKCQHSATNAGIIGRFSNLGLRDNFAISGGARGPQVVALACKMVGGGSDGSLDLCGRVCLTDEHENIIFHSYVKPPIPVTNYRYETTGIRPEYLRDAMPMRQVQRRIQDFLCNGEPMWTIRARGGRARILVGHGLDHDLESLQIEYRTEKIRDTAKYPPLMKTSKLSNSLKYDIQAGIQDPYDDCVATMRLYMRMRSQVHRTQDYPLVSDPQNRNNFASWRQSELERMTPEQMLEVSRSDYYCWCMDSLYNP

SEQ ID NO: 281 - DNA, 1047 bp, Phaseolus vulgaris
  source 1..1047: mol_type = other DNA
atggattgcagaatagaaagtgcagaaactcacaggaataagtgtgcagcatgcttcagacagttcaacaaactggagcaccttgtggagcacatgaggatctcataccattcggttcatgagccaacctgtggcatttgcaggaaacactgcaggtcatttgagtctctaagggaacatcttattggtccattgccaaagcaggaatgcagagatatattttcctatagagggtgcaagttttgcttgaaagtctttgacagccctaatactcgcaggattcaccaagaaaaatgccaacactctgcaacaaacgctggaataattggtcgcttttcaaacttgggacttcgtgataattttgccattagtggtggagcaagaggaccacaagtagtcgcattagcatgtaaaatggttggaggtggtagtgatggctcactggatctctgtggaagagtgtgcttaaccgatgagcatgagaacataatattccattcttatgtgaagccaccaattcctgttacaaactacaggtatgagacaacaggcattagaccagaataccttagggatgcaatgccaatgagacaagttcaaaggaggattcaagactttctttgcaacggtgaacctatgtggacaattcgtgcaagaggaggaagagccaggattcttgtgggtcatggtttggatcatgaccttgaatctttgcaaatagaatatcgaacagaaaaaataagggacactgcaaaataccctcctctgatgaaaacgagcaagctcagcaactcccttaagtatgacattcaagctggaattcaggatccttatgatgactgtgttgcaactatgagactctacatgagaatgagatcccaagttcacagaacacaggattaccctttggtttctgatccacagaacagaaacaattttgcttcgtggaggcaaagtgagctcgaaagaatgactcctgaacaaatgctggaagtatcaaggtctgactactattgctggtgcatggattccttgtataatccctga

SEQ ID NO: 282 - DNA, 2065 bp, Phaseolus vulgaris
  source 1..2065: mol_type = genomic DNA
atggattgcagaatagaaagtgcagaaactcacaggttttgtttctgacatccatgcacaaccacacacatcacatatgcaagggtgtgcataactcttataactcatacttaacactcacatggatatgtgtaagtgacatacacatattttgttactataggaataagtgtgcagcatgcttcagacagttcaacaaactggagcaccttgtggagcacatgaggatctcataccattcggttcatgagccaacctgtggcatttgcaggaaacactgcaggtcatttgagtctctaagggaacatcttattggtaataatctttcttaataactgtgtttacatattcatggtgaaaataattatcacttcatcattgtgaattttttatgagactcaatctgcttttccaggtccattgccaaagcaggaatgcagagatatattttcctatagagggtgcaagttttgcttgaaagtctttgacagccctaatactcgcaggattcaccaagaaaaatgccaacactctgcaacaaacgctgtacaatttttgcctttgaataactatatattttgcaaatgagatatcctcgaaaaacattattctatctaactaatgtttttcctgttaaatgataaaaatatgtactggagttaatacataaaacatgaaatgtatattcttttattattaatactaaaaattgaaaatattgtagaattattcattgggaatttctaacttttggtgaacattattatagggaataattggtcgcttttcaaacttgggacttcgtgataattttgccattagtggtggagcaagaggaccacaagtagtcgcattagcatgtaaaatggttggaggtggtagtgatggctcactggatctctgtggaagagtgtgcttaaccgatgagcatgagaacataatattccattcttatgtgaagccaccaattcctgttacaaactacaggtgggacaattaaacttccttaggttttggagagtttaaccacatatatatatagctggtgtggtgaatggagctactgattcattaacaggtatgagacaacaggcattagaccagaataccttagggatgcaatgccaatgagacaagttcaaaggaggattcaagactttctttgcaacggtgaacctatgtggacaattcgtgcaagaggaggaagagccaggattcttgtgggtcatggtttggatcatgaccttgaatctttgcaaatagaatatcgaacagaaaaaataaggtaaatcattcaatttaacatttaggcagaacatgcagcatatacgttgtctatcatacatatctcagtcaaatattctcttcagaaatacttgtaactttatttaaggaaagttaaataacacttttcattagacccagtgtgtaaaaacttcactgttgacaaagatgacatcttgtataatttattttactgtcactaagagtgtataacttaatttacttattttaagttctttactcctctctgaaacaaattattggtatagaacaagcacatataggtttactactttaatactctctcatattcaaatattgacctaaaagtccttattgaataatcagggacactgcaaaataccctcctctgatgaaaacgagcaagctcagcaactcccttaagtacttaacgcaaacatatcttgggcaagtttctttcacaattttcttcactgtaaaacacaagatgcaatttgatggatgcccatcagccataaatgttttaagattttggggcacatatatatgcaggtatgacattcaagctggaattcaggatccttatgatgactgtgttgcaactatgagactctacatgagaatgagatcccaagttcacagaacacaggattaccctttggtttctgatccacagaacagaaacaattttgcttcgtggaggcaaagtgagctcgaaagaatgactcctgaacaaatgctggaagtatcaaggtctgactactattgctggtgcatggattccttgtataatccctga

SEQ ID NO: 283 - protein, 364 aa, Phaseolus vulgaris
MDAEADSTQIPNIRHKCPACYKQFKKKEHLTEHMKTSNHSVHQPACGVCQKHCKSFESLREHLTGPLPKGVCSKIFSQRGCQLCLVLFDSPGSLVSHRETCRLSAPTRLGTRELPCIDSQFDCLDSSDENHAGWGPGGAVGMDCEMVGGGSDGSLELCARVCLVDEDENLIFHSYVQPQIPVTNYRYDITGLTEEHLRNAMPLYEVREKILQMLYNGESIGKVRLNGGKARLLVGHDLAHDLDCLKMNYPDHMLRDTAKYRPLMKTNFVSHSLKYLTRTYLGYDIQSGTHDPYEDCISVMRLYKRIRAQIHPEEAHETPSHNIVCVPDSWRSRELENLTPDQLYAMSKSDYKCWCLDLRPRLAS

SEQ ID NO: 284 - DNA, 1680 bp, Phaseolus vulgaris
  source 1..1680: mol_type = other DNA
gatttgatttgtgatatttggttgggagcactgctccacttgctgcttgcacagtagcacggtgcgttttgactcaaagcagtggttgcatcttcttccttcgtggggttagggttttggggtagctgaatttttcgtgtgcccgacgatacgagaaaatgttgggattcttctattgacgttccatcgtatatgcgccacaccaaaccacgctttgcatgcgtttgatttaccatttgatatggacgccgaagcggactcaactcaaatccctaatataagacacaaatgcccggcatgctataaacaattcaagaagaaagagcatctaactgagcacatgaaaacctcaaaccattccgtccatcagcctgcatgtggggtctgtcaaaagcactgcaaatcttttgagtctctgagggaacatcttactggtcctttgccaaaaggagtttgttcaaagattttctctcagcggggctgtcaactttgcttggtactatttgatagtcccgggtctctcgtttctcacagagaaacatgtcgcttatctgcccctactcgtctaggaacacgagaactgccctgtatagattcccaatttgactgtctagattcttctgatgaaaaccatgctggctggggccccggaggagcagttggaatggactgtgaaatggttggtggtggaagtgatggttctctggaactttgtgcaagagtatgcttggttgatgaggatgagaacttaatctttcattcatatgtacaacctcaaatacctgttaccaattacagatatgatataactggattgacagaagaacatctcagaaatgccatgcccctttatgaagttcgagaaaagattttgcaaatgctatacaatggagaatccattggcaaagttagactaaatggtggaaaggccaggcttcttgtggggcatgacttagcacacgatttagattgcttgaaaatgaattatcctgatcatatgctaagagacactgcaaagtaccgtcctttgatgaagacaaacttcgtcagccattcgctcaagtatctcacccgaacatatcttggttatgatatccaatccggcactcatgatccgtatgaagattgcatttctgtcatgagactatacaagagaatacgagctcaaattcatccagaggaagcccatgaaacaccgagtcacaacattgtttgcgtgcctgatagctggagatccagggaacttgagaacctcactccagatcagctctatgccatgtcaaaatcggattacaagtgttggtgcttggatttgaggcctagattggcatcctgaattgttttatcattgcatttctccacagcatcatatcataatatgcatatttcttcagacactttgaaaatggggtggtaaaatgttttgcagtgatattttcagtgcttatcgcatagtctggtcctcggatcaagaaaaatattgagcaaagacaggtgtttgattatgatgcttttgtaaatatatctaactgtttgttcaaaccaaataaaggctaccctttttagaatgaagacttgcctaccataataaaggctaccgacacaaacataaatggatgtaaggtttgttctagatccaatttcaacggagccacttagatctaagttgctgattggaac

SEQ ID NO: 285 - DNA, 4357 bp, Phaseolus vulgaris
  source 1..4357: mol_type = genomic DNA
gatttgatttgtgatatttggttgggagcactgctccacttgctgcttgcacagtagcacggtgcgttttgactcaaagcagtggttgcatcttcttccttcgtggggttagggttttggggtagctgaatttttcgtgtgcccgacgatacgagaaaatgttgggattcttctattgacgttccatcgtatatgcgccacaccaaaccacgctttgcatgcgtttgatttaccatttgatatggacgccgaagcggactcaactcaaatccctaatataaggtcaatctgctgcgcctcgctttcaatttttcgtttgttttatttctatcatgattgatcaccgttttgccattgatcggaaaatgaaattaggaggatgatagaatcaaattcaaagttattgagtttttaaattggttatttctgcattttattctctgcttcactttagaggattcacttgtgtgagagaatattctatctagttttcaatcggtttgtgggagctaatgagtatctctgaaatatatgattccctgaatttgctatttacagtgactaatgcgtatctgcgatgtgtagtgaatgatggaatgtactatggttctgagtagaataatatatattgaatcagtgcactcggtgttgttctttttttattcctttgcgtagttcgtttgaaaaatagttgatttttcttcttacagacacaaatgcccggcatgctataaacaattcaagaagaaagagcatctaactgagcacatgaaaacctcaaaccattccgtccatcagcctgcatgtggggtctgtcaaaagcactgcaaatcttttgagtctctgagggaacatcttactggttagtcatttctgtattcaatctgtgctgtcgacattatttattgattccatgttttatgctcgttgtttattttttcttgttccttttttaattatgttttaggtcctttgccaaaaggagtttgttcaaagattttctctcagcggggctgtcaactttgcttggtactatttgatagtcccgggtctctcgtttctcacagagaaacatgtcgcttatctgcccctactcgtctagtaagttgataattgacaaccttatgaaaaaatagctttcttatgttaccgttcaccttaagtaatcaaaggaacctgcttacattcagtgtttcttgtatattcttttattatctgttaggattaggaagtttatgttgtttgttgaactgttgcagggaacacgagaactgccctgtatagattcccaatttgactgtctagattcttctgatgaaaaccatgctggctggggccccggaggagcagttggaatggactgtgaaatggttggtggtggaagtgatggttctctggaactttgtgcaagagtatgcttggttgatgaggatgagaacttaatctttcattcatatgtacaacctcaaatacctgttaccaattacaggtacttttgaatttgtttcattgttttcttttcttttacagattacttgttttaggtttgacagggagaaggaaatgaaaaggaggtatataggatagaaatatcaatgtttcactatttttctgacagcagaaatagggacgagggaagtctttcctatgggatcctcctcttaaattggcacgaaatagaggggagagatgatgtctatttttcattgtctttttagtttcttaaaaaattaactaatatttgtataacaaaataatataaataataaataatttaatgttgaaaataatagagaaaaataatctttttttggattaaattagtacaaggatatttcatacaatttatttactttttcattctctctttcactcatccaaacaaatgaggcaaatttctccactttttccttcttatttttatcaatccaagacaacttatttttttaaatacatttatcctttatttctatccttcatatttctttacttttattcccaataaagcattattctcatagaaaagtgagtgttggggttgattttgttttgatatttcagatatgatataactggattgacagaagaacatctcagaaatgccatgcccctttatgaagttcgagaaaagattttgcaaatgctatacaatggagaatccattggcaaagttagactaaatggtggaaaggccaggcttcttgtggggcatgacttagcacacgatttagattgcttgaaaatgaattatcctgatcatatgctaaggtagattcttcttaataactgaaattttgttaaatcctgcttgacagaattattcttgacaacactgtcttgcactaatttttttatcaccgctttaaggatttatcatgatgatgaacttagcagttgttagaaatcccctgaatttcttctgtttttctcctttttattatcatcatatatacggtattatcctaaacaagtttccagactttaaagatctatactattctaattattattagcactcatcttttgcctatgctttatgttgtgcattgaagagacactgcaaagtaccgtcctttgatgaagacaaacttcgtcagccattcgctcaagtatctcacccgaacatatcttgggcaagttaatttttaactcaatcttttttccgtttaaaatttcttcttccaatttaaagttttccttttattttaaaaatcaaattggcatgatctaatcggccccatttgtatgtacaattgttcaatgactaccatttcaattttcccaggatccttatagattctatgaatgatacttctctctatactaaaataaaataaaattggagattaatactttcttatattcagtacgaataaactaattttgaaggacatgttcaaggtgattgtaaatataaaattttataaactaaaacaagtttttagttattttttggtttcaattttttgtggtttcggtaccgaattttaaatccaaacatcctatgctaaatgattgaccactatctgggtctgtttgctggcaaatgaggtttgactggcaacagttgaaagtgcagaggggtgatagtggaggtggtggcggaggaggtgtggtggttataagtagtgatggtaactggtgatgaagtccgttgttgtagttgctgtggttatagtaatgacggtggtagcagtgataataaaaacattgatagctgactggggagcagcaacaatgaggaccatggtggattgattaacgtgaacaacagtggtggtctgacagtgataacgagtgtaaaatggtgaccatagtgggaaactggtggcaatgagggaggtggtgggttctagtgatgacagtttacacggatggttgaggagagatggggaaactaaattgcttgttcttcctaccaaaatccatcataaagcaaaaccttttttttttaaattcagataaaagtattttaaaaccaactaaaaatcaattcggctccattcgaaaatccaaatttaagaacttacgagcatttttcttttgttttaaaacaaaatgtatttgactaaaatgaagctgcggaattggtttttggcttttacttggaagaacaagtaatccagtttctcccatcttcccttacaagcatccaaagttactgcagtgtgtatgcatcctcaatcaatacttacctgtttaatctttaaattacggtagttaactgctctcaataattttttgttgtgtttttgctttacagttatgatatccaatccggcactcatgatccgtatgaagattgcatttctgtcatgagactatacaagagaatacgagctcaaattcatccagaggaagcccatgaaacaccgagtcacaacattgtttgcgtgcctgatagctggagatccagggaacttgagaacctcactccagatcagctctatgccatgtcaaaatcggattacaagtgttggtgcttggatttgaggcctagattggcatcctgaattgttttatcattgcatttctccacagcatcatatcataatatgcatatttcttcagacactttgaaaatggggtggtaaaatgttttgcagtgatattttcagtgcttatcgcatagtctggtcctcggatcaagaaaaatattgagcaaagacaggtgtttgattatgatgcttttgtaaatatatctaactgtttgttcaaaccaaataaaggctaccctttttagaatgaagacttgcctaccataataaaggctaccgacacaaacataaatggatgtaaggtttgttctagatccaatttcaacggagccacttagatctaagttgctgattggaac

SEQ ID NO: 286 - protein, 371 aa, Cicer arietinum
MESSIDASWIHCDNLYKLGLFVYKYHLTPTIYLKNKCAACYRQFNKVEHLVEHMKISYHSVHEPTCGICRKHCRSFESLREHLIGPLPKQECREIFANRGCKFCLKVLDSPNSRRIHQQKCQLSGLNGISGRFSNMGIRDNLTTGGGATTRGPQVVALACKMVGGGSDGSLDLCGRVCLIDEHENIIFQCYVNPLIPITNYRYETTGMRQEYLRDAMPLKLVQRKIQDFLCNGEPIWTIRSRGGKAKILVGHGLDHDLASLQIEYPTTKIRDTAKYPPLMKTSKLSNSLKYDIQNGIQDPYDDCVAAMRLYMRMKTQIHKIEDYPLASDPQNRNNFATWRQSELERMSPEQMLEISRSDYYCWCMDSSYSL

SEQ ID NO: 287 - DNA, 1116 bp, Cicer arietinum
  source 1..1116: mol_type = other DNA
atggaatcttccattgatgcaagttggatccattgtgacaatctctataaacttggactctttgtctataaataccatctcactcctactatttacctcaagaacaagtgtgcagcatgctacaggcaattcaacaaagtggagcacctagtggagcacatgaagatctcttaccattctgttcatgaaccaacctgtggcatttgcaggaaacactgcagatcctttgagtctctaagggaacatcttataggtccattgccaaaacaagaatgcagagagatctttgccaacagagggtgcaagttttgcttgaaagtccttgacagccctaattctcgcaggatccaccaacaaaagtgccaactctctggattaaatggaataagtggtcgtttttcaaacatgggaattcgtgataatttgacaactggtggtggagcaacaacaagaggaccacaagtagttgcactagcttgtaaaatggtgggaggtggaagtgatgggtcactagatctttgtggaagagtttgcttaatcgatgagcatgagaacatcatcttccaatgttatgtcaatccactaattccaatcacaaactacaggtatgaaacaacaggtatgagacaagaatacttaagggatgcaatgccattgaaacttgtgcaaaggaagattcaagatttcctttgcaatggtgaacccatttggacaattcgttcaagaggtggaaaagctaagattcttgttggtcatggtttagatcatgaccttgcctctttgcaaattgagtatccaacaacaaaaataagggacactgcaaaatatcctccactcatgaaaactagcaagctcagcaattcactcaagtatgacattcaaaatgggatacaagatccttatgatgattgtgttgcagcaatgagactctacatgagaatgaaaacacaaatacacaaaatagaggattaccctttggcttctgatccacagaacaggaacaattttgcaacatggaggcaaagtgagcttgaaagaatgagtcctgaacaaatgcttgagatctcaagatctgactactactgctggtgcatggattcctcatatagtctatga

SEQ ID NO: 288 - DNA, 3022 bp, Cicer arietinum
  source 1..3022: mol_type = genomic DNA
atggaatcttccattgatgcaagttggatccattgtgacaatctctataaacttggactctttgtctataaataccatctcactcctactatttacctcaagttcagttctcttctagtatttctttcatatctaagagaattataaaattcactttaaggaattatggattgcagatttgagactgcagaaactcgaaggttatctttctttcttttaaccatcttcgtagttttaaattgtgatctgcaattacggttgcaacagtcatatttgtctgcatttagctagagcataatagtttgcagtgttccgcaactacgatcataatggcatatatatgcataatttattgagaattatattgttgtgcatgtgcatcttaactagaataaaataactaattatatatttaaaatggatgtatacgtaattaacataatacaaaatataggaacaagtgtgcagcatgctacaggcaattcaacaaagtggagcacctagtggagcacatgaagatctcttaccattctgttcatgaaccaacctgtggcatttgcaggaaacactgcagatcctttgagtctctaagggaacatcttataggtaattaattaattaattaattattcattgtgaatttgtcaccattgaaattttttaaaatgatctatatatatgctattgcaggtccattgccaaaacaagaatgcagagagatctttgccaacagagggtgcaagttttgcttgaaagtccttgacagccctaattctcgcaggatccaccaacaaaagtgccaactctctggattaaatgtatatatcaataatctatcaacttcattctcactgaacttcaattagcatatctagtttcttattggaggataatatagtacttcctcctgtccttttttataagagaaagttggattaaaattaagtcaacaaaaaatgatatatgtcctccacattataaattagatataactacttttgttgaccatattttaacctaatatgtctcttataaaaaggatcaaatggagtaatatatatatatatatacatatgaattcaaagttcttagaaacaatatttagttaaaaattttacttacctctcgattaaactggaaatttttagacttcttatcactgaaaattggaaggataatacaaaaaaaaaaaaaaagcaccttaaaaccaacaatttaatattcaatatttcaaatacatgttttgagtttcaaacaaaagtgatatatttgtagggccggtaatgggcatgtgccagcagaccaactgcaagtccaattttttttttttttgaagagtgttattggattcaaaatatactactaagagataaaaaatcactttgtactatagggataaaaaattaaataaaaaatgcccataattcaaaactaaaaaaggtcaagattttttgacaaaaaattaataagaaaaatagaattagagtttcaatgttattgatgatgtttacaagttgtttttatgttattgatgttatttataatataaatatagaacgattatttttaaattttttatattttttattaagagcctaatttttaaaattaaaacagaacctctaaaatgtacgatacattcttgtatatttagtttaatatttaaaaccatacatcgattttatttgatacactttgtctatatttaaggtttgagggagtagagtagtgatatcatattaattaatactatgagttggttttggagtaatgaagctgattctcactcttatatatagggaataagtggtcgtttttcaaacatgggaattcgtgataatttgacaactggtggtggagcaacaacaagaggaccacaagtagttgcactagcttgtaaaatggtgggaggtggaagtgatgggtcactagatctttgtggaagagtttgcttaatcgatgagcatgagaacatcatcttccaatgttatgtcaatccactaattccaatcacaaactacaggtatgaaacaacaggtatgagacaagaatacttaagggatgcaatgccattgaaacttgtgcaaaggaagattcaagatttcctttgcaatggtgaacccatttggacaattcgttcaagaggtggaaaagctaagattcttgttggtcatggtttagatcatgaccttgcctctttgcaaattgagtatccaacaacaaaaataaggtaaattatattcactctaaaatacttgagcgtgcacattcgctactgaatttggatcatctaggactgtaacattagttaaaaaaaaaaaatattaaatctaagtttagtaagagttaaaaatttatacacttaaattcaacgactctaaaataattatataacttagatcttcaatacacattgatatgtctccataataattacataaaagtggaagaatatgtaattctaaggataaaatctttttaaaaaattgaatagaccaaaatcatatttatattagaagtaccaaaagtgtgattaacttattaattattatgtcaacagggacactgcaaaatatcctccactcatgaaaactagcaagctcagcaattcactcaagtacttaacacaagtatatcttgggcaagtatcatttgaatttcattttattttattgaaaaaaaatgttaaatgtcaatttgtcaaacttacatacatataatatctatttcaaataattagacatataatttggtgcacatatattatacatacaggtatgacattcaaaatgggatacaagatccttatgatgattgtgttgcagcaatgagactctacatgagaatgaaaacacaaatacacaaaatagaggattaccctttggcttctgatccacagaacaggaacaattttgcaacatggaggcaaagtgagcttgaaagaatgagtcctgaacaaatgcttgagatctcaagatctgactactactgctggtgcatggattcctcatatagtctatga

SEQ ID NO: 289 - protein, 353 aa, Daucus carota
MESAESLRNKCRACYRQFNKMEHLVEHMRTSYHSGHEPMCGICKKHCRSHESLREHLIGPLPKVECERIFKERGCHICLDIFSSRNALKAHLNSCQLSRTNVNGLTYRMANLGIFDDMRNHENGGGRGGRVVALACKMVGGGSDGSLDLCARVCLIDEYENTIFHTYVRPHLPVTHYRFETTGIRPEMLKDAMGVRQVQKKIQDFLSNGEPLWKIRPKGGKARILVGHGLDHDLKCLEVDFPGMMIRDTAKYPPLMKTSKLSNSLKYLAKAYLGYDIQTGIQDPYEDCVATMRLYKRMKYQRHKIEDFPQVTDPHRNNFASWRQNELERMSPDDLLALSRSDYYCWCLDSRDI

SEQ ID NO: 290 - DNA, 1062 bp, Daucus carota
  source 1..1062: mol_type = other DNA
atggagtctgccgaatctctaaggaacaagtgccgggcatgctatagacagttcaacaaaatggagcacctagtggaacacatgaggacctcataccattcaggccatgaacccatgtgtggcatttgtaagaaacattgccgttcacacgaatctctcagggaacacctaatagggccattgccaaaagtagaatgtgaaaggatatttaaagagcgtggatgtcacatttgtcttgacatatttagcagccgtaatgctcttaaagcacaccttaattcatgtcagctctcacgcacaaatgtcaatggcttaacatatcgcatggcaaacttaggaatttttgacgacatgagaaatcatgaaaatggaggtggaagaggaggaagagtggttgcactagcttgcaagatggttggtggtgggagtgacggctccttggatctttgtgcaagggtttgtcttattgatgaatatgaaaacactatcttccatacctatgtcaggcctcaccttcctgtcactcactacaggtttgaaacaacggggatacgaccagagatgttgaaagatgcaatgggagtgaggcaagtccaaaaaaaaattcaagacttcctgagcaatggagaaccattatggaagatccgtcccaagggtggaaaagcgcgaattcttgttggtcacggtttagatcatgatctcaaatgtttagaggtggattttccaggaatgatgattagagatacagcaaaatatcctccattaatgaaaaccagcaagctcagcaactcactcaagtacctagcaaaagcatatcttggttacgacattcaaacaggtatacaagacccttatgaagactgtgtggcaacaatgaggctgtacaagcgaatgaagtaccaacgtcacaaaattgaggacttccctcaagttactgaccctcatcgaaataattttgcttcatggaggcaaaatgagcttgaaaggatgagtccagatgacctgttagcactttcaaggtccgattactattgctggtgcttggattctcgggatatatga

SEQ ID NO: 291 - DNA, 1946 bp, Daucus carota
  source 1..1946: mol_type = genomic DNA
atggagtctgccgaatctctaaggttcttatcattctcctcctctaatgctgtatataatggttaaattacggcaaaggtgatcctaattaagtcatgtgatttcaggaacaagtgccgggcatgctatagacagttcaacaaaatggagcacctagtggaacacatgaggacctcataccattcaggccatgaacccatgtgtggcatttgtaagaaacattgccgttcacacgaatctctcagggaacacctaataggtatctatgtaaaacacatacagatatttattctctttcatttttatcttgccttgttaagttcctatgcagtgatacatctttttaaattcttgattaacctgtgatctcagggccattgccaaaagtagaatgtgaaaggatatttaaagagcgtggatgtcacatttgtcttgacatatttagcagccgtaatgctcttaaagcacaccttaattcatgtcagctctcacgcacaaatgtcaatgtaagttgtatatgctatgaactaatcattcttgtagctttgctatgcacaaaaatagtatcaaattaaccatatgtaactaatttacttgctaaattctttcagggcttaacatatcgcatggcaaacttaggaatttttgacgacatgagaaatcatgaaaatggaggtggaagaggaggaagagtggttgcactagcttgcaagatggttggtggtgggagtgacggctccttggatctttgtgcaagggtttgtcttattgatgaatatgaaaacactatcttccatacctatgtcaggcctcaccttcctgtcactcactacaggtaattaagcataaatatgaagtttttgtgactatctgatcaacaagaaaataaaaactatattcgtacaatttgtgtgtgtttctgttaatgaaaaatgatgggatattattaggtttgaaacaacggggatacgaccagagatgttgaaagatgcaatgggagtgaggcaagtccaaaaaaaaattcaagacttcctgagcaatggagaaccattatggaagatccgtcccaagggtggaaaagcgcgaattcttgttggtcacggtttagatcatgatctcaaatgtttagaggtggattttccaggaatgatgattaggtaaagtactccatatatttcacaaacacagaaacacaagtattgtaactttgcacaattcaatatctagacacaaataaataacataagttacctttgatttttggcgcagagatacagcaaaatatcctccattaatgaaaaccagcaagctcagcaactcactcaagtacctagcaaaagcatatcttgggtaacttccataattactcaatcagtatatgcaactcttgttgtttctacaaaaaaaaaacacaaaagtataaagcataggcggtcattatagaaattttaacttgcaaacatttcctcaggtagttgatggttaatcatcaacctttgctaatttaaatagtattatttttctcttcagaaaatgttatttagatactgaagcatctagctccaccgaaacatcattctcatgttaggtagtacttcagaatatatgtgcaactacaaaccaggggatatgatgttcttcttaagtttattatggagtacagtagaaaattaaatttaattattttctctttctcctttttcagttacgacattcaaacaggtatacaagacccttatgaagactgtgtggcaacaatgaggctgtacaagcgaatgaagtaccaacgtcacaaaattgaggacttccctcaagttactgaccctcatcgaaataattttgcttcatggaggcaaaatgagcttgaaaggatgagtccagatgacctgttagcactttcaaggtccgattactattgctggtgcttggattctcgggatatatga

SEQ ID NO: 292 - protein, 330 aa, Daucus carota
MESAEHLRNKCAACYRQFNRMEHLVEHMRTSYHSDHEPMCGICRKHCRSFESLREHLIGPLPKAECERIFKERGCHICLNILGSRNALRSHLNACQLPRTNVNGLAYRMANLGIYDNTRNYENAGGRVVALACKMVGGGSDGSLDLCARVCLIDEYENIIFHTYVKPQLPVTHFRYETTGIRPEMIMDAPGVRQVQRKIQEFLCNGEAMWKIRPKGGKARILVGHGDTAKYPPLMKTSKLSNSLKYLAKAYLGYEIQTGIQDPYEDCVATMRLYKKMKYQSHNNKVEDIPLATENRNNFASWRSNELERMSPDELLRISASDYYCWCLDS

SEQ ID NO: 293 - DNA, 993 bp, Daucus carota
  source 1..993: mol_type = other DNA
atggaatctgcagagcacctgaggaacaagtgtgcagcatgctacagacaattcaacaggatggagcacttggtggaacacatgaggacctcgtaccattctgaccatgaacccatgtgtggtatctgcaggaaacattgtcgatcatttgaatccctcagggagcaccttataggaccattgccaaaagccgaatgtgaaaggatattcaaagagcgtggatgtcacatctgtctgaacattcttggcagccgcaatgctctcaggtctcaccttaacgcatgccagctcccacgcaccaacgtaaatgggttggcatatcgcatggcaaacttggggatttacgacaacacaagaaactatgagaatgcaggtgggagagtggtggcacttgcttgcaagatggttggtggggggagtgatggctccttggatctctgtgctagggtttgtcttattgatgaatatgagaacattatcttccatacctatgtcaaaccacagcttcctgtcactcactttaggtatgaaacaacaggcatacgaccagagatgattatggatgcaccaggagtgcggcaagttcaaaggaagattcaagaattcctctgcaatggagaagcgatgtggaagatccggcctaagggaggaaaagcaagaatccttgttggtcacggagatacagcaaaatatcctccactaatgaaaaccagcaagctcagcaactcactcaagtacctagcaaaagcatacctcggttacgagattcaaacaggtatacaagatccttacgaggattgtgtggcaacaatgcggctatacaagaaaatgaagtaccagtctcataacaataaagtagaggacatccctcttgccactgaaaaccgcaacaattttgcttcatggaggtcgaatgaactcgagaggatgagtccggatgaactcctgcggatctccgcatctgattactactgctggtgcttggattcttaa

SEQ ID NO: 294 - DNA, 1920 bp, Daucus carota
  source 1..1920: mol_type = genomic DNA
atggaatctgcagagcacctgaggttcttaattcttctttttgtccatcgcttgacttctatgcataactaatagacatgatgatcagtatctagttacaatttaattgcaggaacaagtgtgcagcatgctacagacaattcaacaggatggagcacttggtggaacacatgaggacctcgtaccattctgaccatgaacccatgtgtggtatctgcaggaaacattgtcgatcatttgaatccctcagggagcaccttataggtatccattttgatcactcaaagcatacatgcctgctctatactccaatacactcataggtatccttttgtagttgcagatttgttaatttttcttcatttactcaatttctcatatgcaggaccattgccaaaagccgaatgtgaaaggatattcaaagagcgtggatgtcacatctgtctgaacattcttggcagccgcaatgctctcaggtctcaccttaacgcatgccagctcccacgcaccaacgtaaatgtaagcctgtaaatgaaaatgaaacaatttgtttttccatcaattgactgctgatcacatggattatttacactcattaaccgcaggggttggcatatcgcatggcaaacttggggatttacgacaacacaagaaactatgagaatgcaggtgggagagtggtggcacttgcttgcaagatggttggtggggggagtgatggctccttggatctctgtgctagggtttgtcttattgatgaatatgagaacattatcttccatacctatgtcaaaccacagcttcctgtcactcactttaggtacctattttcaagcttcatctgcttctatacgactcccatctatcccaaaaaatggcttggtttttccaatcaaataaccagttttgtaatgcaaaatcttcatttatatgattttttttattaaaaattatatggaataacaatatggtgtcaatatgtttacaattttatgtgacagttagaaaaaacgaaaattttcaggtatgaaacaacaggcatacgaccagagatgattatggatgcaccaggagtgcggcaagttcaaaggaagattcaagaattcctctgcaatggagaagcgatgtggaagatccggcctaagggaggaaaagcaagaatccttgttggtcacgggttggatcacgatctcagatgcttagaggtggactaccctggaacaatgatcaggcaagttttatctcacattcacatatataaaccatccacagtacataactaaacattagaacgattaaaacctgaacttgatgagcacgattggatagcccaagtggtgggtttatcctttgttgtccccaaacactcgggttcaactctggctcatcctaagaagtattaaaacagatattcatttgcaaggcatataagcctaaattgtcaacaaaaaaaaacctgaacttgattaacaagtcattcttctgtttaatttggttgcagagatacagcaaaatatcctccactaatgaaaaccagcaagctcagcaactcactcaagtacctagcaaaagcatacctcgggtaaactacttaataaattcacactatatcgtttcgctcttctgcctctgcatactgaacacatttaatctcggccaatcattcactttatttgtgttatcagttacgagattcaaacaggtatacaagatccttacgaggattgtgtggcaacaatgcggctatacaagaaaatgaagtaccagtctcataacaataaagtagaggacatccctcttgccactgaaaaccgcaacaattttgcttcatggaggtcgaatgaactcgagaggatgagtccggatgaactcctgcggatctccgcatctgattactactgctggtgcttggattcttaa

SEQ ID NO: 295 - protein, 241 aa, Asparagus officinalis
MSRLGLQSSSDFDARAHGARVVALGCKMVGGGSDGTLDLCARVCLIDENENIIFHTYIRPRLPVTNYRYETTGIRPENLRDAIPLKLAQRKIQDFLCNGEALWKIRSQGGRARILVGHGVDHDLGCLGIEYPSLLIRDTASYPPLMKTSMLSNSLKYLTHAYLGYEIQNGIQDPYEDCVAAMRLYVRMRSQAHPRDYSSGSGEAQSRNKFPSWRQRELERMTPEALLEISASDYYCWCLDS

SEQ ID NO: 296 - DNA, 726 bp, Asparagus officinalis
  source 1..726: mol_type = other DNA
atgtcgagattgggtttacaaagctcatcagactttgatgccagagctcatggagccagagtggtggcattgggttgcaaaatggtcggaggaggaagtgatggaacattagatctctgtgctagggtttgcctcattgatgaaaatgaaaatatcatcttccacacttacatcagacctcggctaccagtcacaaactacaggtacgaaacaacgggaataaggcccgaaaacttgagggatgcaatcccattgaagctagctcaaaggaagattcaagatttcttatgcaatggggaagcactatggaaaatccgatcacagggtggaagggcaaggattctggtgggacatggagtagatcacgatttaggatgtctaggaattgaatacccttcacttcttatcagggacactgccagttatcccccactgatgaaaacaagcatgcttagcaactcactcaagtatctcacacacgcctaccttggttatgaaattcaaaatggcatacaagatccatatgaggactgtgtagcagccatgaggctatatgtcagaatgcgctcacaggcccacccacgtgactattcctcaggatcaggtgaagctcaaagccgtaataaatttccatcttggagacagagagagcttgagaggatgactccagaggccctgctggagatttctgcatctgactactactgttggtgcttggactcttaa

SEQ ID NO: 297 - DNA, 1179 bp, Asparagus officinalis
  source 1..1179: mol_type = genomic DNA
atgtcgagattgggtttacaaagctcatcagactttgatgccagagctcatggagccagagtggtggcattgggttgcaaaatggtcggaggaggaagtgatggaacattagatctctgtgctagggtttgcctcattgatgaaaatgaaaatatcatcttccacacttacatcagacctcggctaccagtcacaaactacaggtaacaaaagaaaatttctgaactggatagtactggtaatcttcttgaagtggtttgtattcctgatacatctgaattttggacaacttcataggtacgaaacaacgggaataaggcccgaaaacttgagggatgcaatcccattgaagctagctcaaaggaagattcaagatttcttatgcaatggggaagcactatggaaaatccgatcacagggtggaagggcaaggattctggtgggacatggagtagatcacgatttaggatgtctaggaattgaatacccttcacttcttatcaggtaattgaggttcttatacatcaaatattcttgcaaacctaatgatagttttttgttttgcatttacatagttgccttctcacagggacactgccagttatcccccactgatgaaaacaagcatgcttagcaactcactcaagtatctcacacacgcctaccttgggtaagtactaagtagtaagtacattatgattttcttcatcatttaagtttacaccctagaataactcaaaacaactaaattcaattacatcttgattggtccaccaaccctgatgcatatatataaaatttgtttctttccgtttcaaatgtgtgcaccatgataagcagtgtggaatatataaaaatacaaccatttttacatcggttatcatatccatattatactcgagcaaatactcacttgaatttacccctccctttcgaatgactagttatgaaattcaaaatggcatacaagatccatatgaggactgtgtagcagccatgaggctatatgtcagaatgcgctcacaggcccacccacgtgactattcctcaggatcaggtgaagctcaaagccgtaataaatttccatcttggagacagagagagcttgagaggatgactccagaggccctgctggagatttctgcatctgactactactgttggtgcttggactcttaa

SEQ ID NO: 298 - protein, 392 aa, Asparagus officinalis
MEPQAEIPKSSRHKCSACFKQYKIKDHLVEHMKKSYHSVHQPKCGVCKKHCKTLESVREHLTGPLAKSDCAVVFAALGCKLCLSIFDNVDARGLHEVSCSFDPPSVPELMSLPIADMCDEVEAAVLNSAVPDDNGTCPKLVALDCEMVGGGDYGSFNLCGRVCLVNEKEEVIFHAYVKPIIPITDYRYELTGITEDHIVDATPICEVSKRVKEILYNGEESTWRMRTDGGEACLLIGHDLDHDLEVLRMDYPENLTRDTAKYRPLLKTNLKSHSLKYLTKTYLGYEIQSGTHNPYEDAVSAMRLYKRIRSIVHQTNEISIQDNDDSIYYTNDSKKNSPFDSNKNNKKKSPFDLYKKCELLAKSPDELLEISKSSYKCWCWDAKRTLNRMIEE

SEQ ID NO: 299 - DNA, 1179 bp, Asparagus officinalis
  source 1..1179: mol_type = other DNA
atggaaccacaggcagaaattcccaaatcctcgaggcacaaatgctccgcatgtttcaagcaatacaagataaaagatcaccttgtcgaacatatgaagaaatcatatcattcagttcatcagcccaagtgtggggtctgtaaaaagcattgcaagacactggaatcagttagagagcatcttacaggtccactggccaaatctgactgtgcagtggtctttgctgccttgggttgtaagctctgtctatcaatatttgataatgttgatgctcgtggcctacatgaagtctcttgtagctttgatccaccttctgtccctgagctaatgtccttgcctattgctgacatgtgcgatgaagttgaagcggcagttttgaactcagctgtgccagatgataatggtacttgccccaaattagtcgctttggactgtgaaatggttggaggtggagattatggttcatttaacctttgtggtagagtttgccttgttaatgaaaaggaggaggtgatatttcatgcatatgtaaagcctataattccaatcactgattacagatatgaattaactggcataacagaggatcatatcgtagatgcaacaccaatttgtgaagtttcaaagagagtcaaagaaatattgtataatggggaagaatcgacatggagaatgcgaactgatggtggagaagcttgtcttcttataggtcatgacttggaccatgatcttgaagttttacgaatggactaccctgagaacttgacacgggatacagccaaataccgtccgcttctgaaaacaaatttgaaaagccattctctgaagtatctgaccaagacctacttggggtatgagatacagtctggtacacataatccatatgaggatgcagtttctgctatgagactttataaaaggattcgctctattgtgcaccaaaccaatgaaatttccattcaagataatgatgatagcatctattataccaacgacagcaagaagaacagcccatttgattccaacaagaacaataagaagaaaagcccatttgatctatacaagaaatgtgaactcttggctaaatccccggatgagctacttgagatatccaagtcctcctacaaatgttggtgctgggatgcaaaaagaacgctaaacaggatgatagaagagtga

SEQ ID NO: 300 - DNA, 5965 bp, Asparagus officinalis
  source 1..5965: mol_type = genomic DNA
atggaaccacaggcagaaattcccaaatcctcgaggtgaatatttccttttatcttctaattctgtagctatccattaatttcttttgtcattcaatcctgtatttggtaattagagtgaaaattaaatgacttcttgggttgcttacctacttaccgcatttccttttaaggtgatgcatgggtttgttgcttatcggtttttaaattcaaatttatgtggaaaactcaaatgggttttgattttttcagtgatcttaggaatcatacttcgacctgctagttaagggggggttagtcatctagaacttaaatttggaactgggataatctgtgtgataaatttttaaggtgttagtcacatagaactaaaactagaataaaattttacggtgttagtcaagtagaactctaacaaaacgagaattgggataatggtacaaaattatcccatttttttatttttttatacaaaaataagagttctagtctctcaaattattctaagttttagcttggaactaggtggtaaaaaactaaaactcatatttattttgttttttttttatttttatattttttcctttagggggggttagtcatctagaacttaaatttggaactgggataatctgtgtgataaatttttaaggtgttagtcacatagaactaaaactagaataaaattttacggtgttagtcaagtagaactctaacaaaacgagaattgggataatggtacaaaattatctcactttttttatttttttatacaaaaatgagagttctagtctctcaaattattctaagttttagcttggaactaggtggtataaaactaaaactcatatttattttgtttttttttatttttatattttttctttacttctttcctattatgggtatcacttaaatgtcccaattaactaacaccccctaagggagttgtttccaatttagagaaaaacctggacgcttttaggtatttcagtgcatttattcttgttatagttttagggactttttttaaattagtctttgaagggcattgaatattagcgattaacccatccttgtttagttttaaattataaaattttaagagaagtaaacaacgcggttaaccccccccccctaagctccgattcccgctactccactctagccacatggtgcttacaagtgcagacaattcctgtacctttattgtcagggggaaccccttttgatgcctcaacagctcacgtaggcaccttaggcacaccaaaggcttgtgggacatgacatgcaaggtgcccttacctctattttgaaattttgagagtgcgacgggtgtataacaaagtaaactgattttggaaataaaatatatatcttttcttttccttggcagattgtttgatattttttcttgtaatgtgcctaattacctatacctatattcgaggacatgacagtttgaaacttgaagtccaaactttattgctttatgacctatgtaactaattagtagttagtagaactatttaatatttgttactactctgtttagatggttcgtgtgttgttaaatatcatagtttgtgactttttgtgcaatttttgaaactttttggattttttaataatacttcatgaattataatatgttagctatgtatgatttcttaatcttatttttttaaattgttgagttgtaggtagttcacgcaggattaatataggatataattagtattaggatagtgtaagatttaaatgaaatattcaaaataatgtttcatgtattttattaatctttttttataaattgttgagctataagtagttcacattggattagtatcagatataattaggattaggataaattaagatttatataaaatatttaaaataatgaagagtaatattgaccatggaaagcaacatcatgacctcatctccttaaacttgcgtttcgcttttaaaacactgcttatactttagtgaaaaagaagtcacaatcttcttggtctgcgcctaaatagttatctcatttccaattctcaaagtcctatcaacgatagtatcacaaacttattctgcaacaagtatctcttgttcttcagctttacataagtaattcgagtgttctgaagattatagatatatttggccccatacatggagaggtacaaaggtaggtctcataacagactgcctcagacactagagtagacactagggtctcttgacaatagagcctcacacatggagacataaagtagaagttcatataaggagaccgatagtaacgactcggacattgatacaaacaatagggtcttggatttggcttttttgttttgaatctttacggtcgttgtcagagagtgttatatgaggagaagatgaagctaccagggggaagcttagagatggtacttgagccgacaacccttgtggctgctttgagttttaggcattataaaagaggtattatcatggttttgaatatccctaatatatcattttataaggcttgctgctaaatgatatgatctcaattcattttcggttttgtcaatttttaggcgatattatatcatgattttccaatatatcaagttacatttcagcctcaaaaatcaccagaaatgttgcagtatcaatttggatttttatttgttataaaagattggtctggatttatggttcaattgaggcctaaacccgaacaaatatctgttaaataaccagaaacaagtggagctcgattgagaccgaattctcttgcaacatgttcccaatatctgatagttagaacattgggtattatagaattatcattttagcttcggtacattgttatgttgcagaaagtaatttcaccatagtgagggtctgagggatattcagagtttatttattgtaaatcaaaaacaacacacaagtacattttttcaatgagaaacaaccgaagttctggaactttcctaaatatataactgctctaataatgggtatttgttaaagttgagaaacggtgagaggatgagatggagacaggagctatgctggatgaaactgctagaagcctagaacaaactaggtctgaagctataatggagtagaatgtgaatggagccacatacaaatacaataaaaaatatggacttaataggcaatagagaaagctttccatttagtagattctaatcatgcagggtaaaggctttgttgtttcaatttctggtttgttgttttcttgtttccctcttggtgtctgtgtagttataatggaaattctgataacaaaaacaccatttcgtttgaaaatggatgtcaaaatcccaagagcggaaaaattattagtcctaaagctattagccttcataacaagtaatggaggctaagcatgcatgcatgccaccttgtataaatcatgtgaatatgcttaattccgtgttctagaggattgcttctgctgttttttatatatgacaatttgttgtttgctattcaaggcattttcattagttagcaattgggcatcagagtggacattcatatgcttcatgcatcttaatctaacctttttacaggcacaaatgctccgcatgtttcaagcaatacaagataaaagatcaccttgtcgaacatatgaagaaatcatatcattcagttcatcagcccaagtgtggggtctgtaaaaagcattgcaagacactggaatcagttagagagcatcttacaggtagctacttaagctaaactttaagcatatgcagttatgtttcaaatgttagttttaatctcttactatttcttatttttcactctattaaatttcaattgcatgaaggtccactggccaaatctgactgtgcagtggtctttgctgccttgggttgtaagctctgtctatcaatatttgataatgttgatgctcgtggcctacatgaagtctcttgtagctttgatccaccttctgtccctgtaagttatgcaacaaaagcttgatactcatatattcttctacttagtctctcccatctaaagttgaatgggtatttttataggagctaatgtccttgcctattgctgacatgtgcgatgaagttgaagcggcagttttgaactcagctgtgccagatgataatggtacttgccccaaattagtcgctttggactgtgaaatggttggaggtggagattatggttcatttaacctttgtggtagagtttgccttgttaatgaaaaggaggaggtgatatttcatgcatatgtaaagcctataattccaatcactgattacaggttctctctttcagttcattcctgatgattgttataggaatgggttatttagatattagtccataaagtcatcaagaattccatattagccttcaaatatgtgaaattgctcgtgagtgggtcttgcacttggtcgctcaatgaccaaactaccctccagtctatgttccctctaaaaacccttctcgtccagaaaaacattggctaacgggtattttggtcattgagtgaccaaattgcaagacatcttaggatttgagagacatgcataatttcaaatatgtgaaggattaatatagaactattgaagatttgagagactgtatataataaccctttaggaatttcttgtgtttgtgtattcagattaaccttaatttgcaactggctccagatatgaattaactggcataacagaggatcatatcgtagatgcaacaccaatttgtgaagtttcaaagagagtcaaagaaatattgtataatggggaagaatcgacatggagaatgcgaactgatggtggagaagcttgtcttcttataggtcatgacttggaccatgatcttgaagttttacgaatggactaccctgagaacttgacacggtgagctcttgatgatcctcttgtcctcttcttagttgaatgcaaaattaaattgcatttacaaccttatgaaaaattaaagtttttttttctttttcttttgggctaactcactgaattgttcctttgatctttatacagggatacagccaaataccgtccgcttctgaaaacaaatttgaaaagccattctctgaagtatctgaccaagacctacttggggtgtgtaactcgttcgtatgttacactccctatcaacactgtaatatttatagtaaaatacaacttcgtgttcttttaggatgttttattgctaaatttagtggtttagtatcaagtttcctgatataattgtaaagttcatatttgtttaagtgacattgattaaagaataattcaaccatgtactcaaacactaagtgtcaaagcgcatgacttatactctttaagcttgtagaattataacatacggacaagtagaaattttttttatctggaaatatgaagtatctcgactctaatatcatcctctgtggttgataatatgatatctcttgtttaccccgtattactaggaaatagtaaacaattgaattgattgagaatgtaaccactgtttttgaatcctaatgcatgcattcatgtcgatacacttcttctgttaacaactagataatcctgtttgaaaatcccaaaatgaatttattaaccaagttttggctttataggtatgagatacagtctggtacacataatccatatgaggatgcagtttctgctatgagactttataaaaggattcgctctattgtgcaccaaaccaatgaaatttccattcaagataatgatgatagcatctattataccaacgacagcaagaagaacagcccatttgattccaacaagaacaataagaagaaaagcccatttgatctatacaagaaatgtgaactcttggctaaatccccggatgagctacttgagatatccaagtcctcctacaaatgttggtgctgggatgcaaaaagaacgctaaacaggatgatagaagagtga

SEQ ID NO: 301 - protein, 294 aa, Solanum tuberosum
MGFLGPLPKAECEKIFKERGCDICLTFLASRNALRAHKESCQFSRSNNGLLYRMTRLGLGFQDDLKIGNSQGRVVALSCKMVGGGTDGSLDLCARVCLIDEHERILFESYVAPNIPITNYRYEISGIRPEYMRNAMPLKQVSRKIQDYLCNGEPIWQIRTRSGRARILVGHNLDHDLKCLEIEYPTIMIRDTAKYPPLMKTSKLSNSLKYLSKAYLGYEIQIGVQDPYDDCVATMRLYMRMKSQVHKRENYPLATDPQNRNNFASWRENELEKMMPPQLLEISRSDYYCWCLDS

SEQ ID NO: 302 - DNA, 885 bp, Solanum tuberosum
  source 1..885: mol_type = other DNA
atgggatttttaggaccattgccaaaggctgagtgtgagaagattttcaaggaacgaggatgtgatatttgtttgacattccttgctagccggaatgcactaagggctcacaaggaatcatgtcaattctcacgctcaaataatggtttgctctatcgcatgactaggttgggattaggatttcaagatgacctaaaaattggcaatagtcaaggaagagttgttgctctttcctgcaaaatggtgggaggtggcaccgatggctctcttgatctttgtgcaagagtttgcctcattgatgaacatgaaagaatcctctttgaatcctatgttgcaccaaatattcccatcactaactataggtatgaaatatcggggataaggccagaatacatgagaaatgcaatgccactaaagcaagtatcaagaaaaattcaagattatctttgtaacggggaacctatttggcaaattcgtactagaagtggaagggcaaggatccttgttggtcacaatttggatcatgatttaaaatgcttagaaattgagtacccaacaataatgataagggatacggcaaaataccctccactaatgaaaacaagcaagctgagcaactcactcaagtacttgagcaaagcttatcttggatatgaaattcagataggagtgcaagatccatatgatgattgtgttgcaacaatgaggttgtacatgagaatgaaatcacaagttcataaaagggagaattatccacttgcaactgacccacaaaatcgtaataattttgcatcatggagggaaaatgagcttgagaagatgatgcctccacaattactagaaatctcacgatctgattattattgttggtgtttggattcctag

SEQ ID NO: 303 - DNA, 1326 bp, Solanum tuberosum
  source 1..1326: mol_type = genomic DNA
atgggatttttaggaccattgccaaaggctgagtgtgagaagattttcaaggaacgaggatgtgatatttgtttgacattccttgctagccggaatgcactaagggctcacaaggaatcatgtcaattctcacgctcaaataatgtatgcttattccaacaacacaactatggttaaacgtaactcaactgacaccttattttttctcatagttttaaatatatttgttaattttcagggtttgctctatcgcatgactaggttgggattaggatttcaagatgacctaaaaattggcaatagtcaaggaagagttgttgctctttcctgcaaaatggtgggaggtggcaccgatggctctcttgatctttgtgcaagagtttgcctcattgatgaacatgaaagaatcctctttgaatcctatgttgcaccaaatattcccatcactaactataggtaattaattaattaattatcgtactaaagtttaattaattaacataatatagacgatttgatcaataatattgttaatgtttaggtatgaaatatcggggataaggccagaatacatgagaaatgcaatgccactaaagcaagtatcaagaaaaattcaagattatctttgtaacggggaacctatttggcaaattcgtactagaagtggaagggcaaggatccttgttggtcacaatttggatcatgatttaaaatgcttagaaattgagtacccaacaataatgataaggtaaacacaacatgcatgtacaattagtaatatgataagagaataaaatttactaaattacattaattactcctattaattacaatcaaagtaaaaattatatgtaaatttctcctattgtttaatgttttttgtttttaatatttttaatttgtatgtagggatacggcaaaataccctccactaatgaaaacaagcaagctgagcaactcactcaagtacttgagcaaagcttatcttgggtacgtaaatactttaaattgttaattattgtgactttttatgttcaaattcacacatcgtcctaatcagaatcaatcttaattgtcttgtaatcgaatagatatgaaattcagataggagtgcaagatccatatgatgattgtgttgcaacaatgaggttgtacatgagaatgaaatcacaagttcataaaagggagaattatccacttgcaactgacccacaaaatcgtaataattttgcatcatggagggaaaatgagcttgagaagatgatgcctccacaattactagaaatctcacgatctgattattattgttggtgtttggattcctag

SEQ ID NO: 304 - protein, 243 aa, Solanum tuberosum
MANLGIQDELRIDNNRGRVVALACKMVGGGSDGSLDLCARVCLIDEHERILFHSYIKPNIPVTNYRYEMTGIRPEYLRDAMPLRNVSRKIQEFLCNGEPIWQIRSKGGRSRILVGHGLDHDLKCLEMDYPAIKMRDTAKYPPLMKTSKLSNSLKYLTKAYLGYDIQIGVQDPYEDCVATMKLYMRMKLSQFHKKENYPLATDPQNKNNFASWRQNELERMTPDQLLDFSRSDYYCWCLDSQDY

SEQ ID NO: 305 - DNA, 732 bp, Solanum tuberosum
  source 1..732: mol_type = other DNA
atggctaatttggggattcaagatgaactaagaattgataacaacagaggaagagtggttgcccttgcttgtaaaatggttggtggtggaagtgatggatctttagatctttgtgcaagggtttgtctcattgatgaacatgaaaggatcctctttcattcatatatcaaaccaaatattcctgtcactaactacaggtatgaaatgacgggtataagaccagaatatttgagggatgcgatgcctttaaggaatgtgtcaagaaaaattcaagaatttctttgcaatggggaacctatttggcaaatccgttctaaaggtggaaggtctaggattcttgttggccatggtttggatcatgatcttaaatgtttggagatggattacccagcaataaagatgagggatactgcaaaatacccaccacttatgaaaacaagcaagctcagcaactccctcaagtacttgaccaaagcttacctcgggtatgatattcaaattggagtacaagatccctatgaagactgtgtggccacaatgaaactctacatgagaatgaaattatcacaatttcacaaaaaagagaattatcctcttgctactgatccacaaaataaaaataactttgcatcttggaggcaaaatgagcttgagaggatgactcctgaccaactgttggatttttcaaggtctgattattattgttggtgtctggactcacaagattattaa

SEQ ID NO: 306 - DNA, 1578 bp, Solanum tuberosum
  source 1..1578: mol_type = genomic DNA
atggctaatttggggattcaagatgaactaagaattgataacaacagaggaagagtggttgcccttgcttgtaaaatggttggtggtggaagtgatggatctttagatctttgtgcaagggtttgtctcattgatgaacatgaaaggatcctctttcattcatatatcaaaccaaatattcctgtcactaactacaggtgatcaatttaaattaataacgtaaaaaaatcttaacacaataaataaatttccatctttattataacattttatttagttactatgctatcgaacggagtaataatacttagcttgttgtgtaaatattttcacattcctagtacataaaatttaaactcaaatattaaagcatgttcacttgtttttggtctttttggggcccattgtaaattcctacgacaccatgacaagaaggtataagaattttcttatattgactatgtatattaacttaaactctgacgagaattatatatgtttataggtatgaaatgacgggtataagaccagaatatttgagggatgcgatgcctttaaggaatgtgtcaagaaaaattcaagaatttctttgcaatggggaacctatttggcaaatccgttctaaaggtggaaggtctaggattcttgttggccatggtttggatcatgatcttaaatgtttggagatggattacccagcaataaagatgaggtaaattaattatttgatcatttatataatctaaaaataatttcataactttattgctataaaaaacatgaaattgactcgtactcatagttgttgttattatatagtagtatatattactccgatccctatagatgaacgttctaacaaagacaaacaacacgggaaaattacagtcaaatgtctttaggtcatctagtttacaaagtatatacacagtagtagtgtatattttatactaaatatatatacatatatttattcatttgatatacctaccttatacatataagcaatatatatagcttgaagtatataaatagtgtatatttcgaccatatttacgtgacttcccttctaacatttgtttaattttttcttttttctgaagggatactgcaaaatacccaccacttatgaaaacaagcaagctcagcaactccctcaagtacttgaccaaagcttacctcgggtaatatatattaatagtgcatcaaactttatcctaataaattttcttgagtaccacaactatatattattaatttaacttgttgcaagttacgttttataaaaaatctaaaaattgatggacaataatataatgaaaaatgtgtaggtatgatattcaaattggagtacaagatccctatgaagactgtgtggccacaatgaaactctacatgagaatgaaattatcacaatttcacaaaaaagagaattatcctcttgctactgatccacaaaataaaaataactttgcatcttggaggcaaaatgagcttgagaggatgactcctgaccaactgttggatttttcaaggtctgattattattgttggtgtctggactcacaagattattaa

SEQ ID NO: 307 - protein, 349 aa, Carica papaya
MDYQASETLRNKCAACFRQFNKMEHLVEHMRISYHSVHEPMCGICKKHCRSFESLREHLIGPLPKQECKNIFSVRGCKICLAIFDTPNARWVHQERCQLSNANTGLVGRFANLGLRDNLTIDCASRGPQVVALACKMVGGGSDGSLDLCARVCITDEYNNIIFHSYVKPPIPVTNYRYEITGIRAEYLRDAMSLRQVKKKIQDFLCNGEPMWKIRPKAGRARILVGHGLDHDLDRLQIEYPSLMIRDTAKYPPLMKTSKLSNSLKYLTQAYLGYEIQNGIQEPYEECVATMRLYMRMRNQSHKKEDYPLASDPQNRNNFASWRQNELERMIPEEMLAISRSDYYCWCLD

SEQ ID NO: 308 - DNA, 1050 bp, Carica papaya
  source 1..1050: mol_type = other DNA
atggattaccaggcctctgaaaccctaaggaacaaatgtgcagcctgtttcaggcaattcaacaagatggagcacctggtggagcacatgaggatttcttatcactcggtgcatgagcccatgtgtgggatctgtaagaaacattgcagatcttttgagtctctaagggaacatcttatagggcccttgcctaagcaagaatgcaagaacatattcagcgtccgaggatgcaaaatctgtttagcgatctttgacactcctaatgctcgttgggttcatcaagaaagatgccagctttctaatgcaaacactgggttagtgggtcgatttgcaaacttagggctgcgtgacaacttgactattgattgtgcgagccgaggtcctcaagtagttgcattggcttgcaagatggttgggggagggagtgatgggtccctagacctctgtgccagggtctgcatcaccgacgaatataataatatcatctttcattcttatgtcaagccaccgattccagtcacaaattacaggtatgagataacgggaattcgagctgaatacctgagagatgcaatgtcactaaggcaagtgaagaagaagattcaagattttctgtgcaacggagagccaatgtggaaaattagacccaaagcaggaagagcaaggattttagtgggtcatggtttggatcatgatcttgatcgtctacaaattgagtatccttctctcatgatcagggatactgcaaaatacccgccattgatgaagacaagcaagctcagcaactcactcaagtacttaactcaagcatacctggggtatgagatacaaaatgggatacaagagccatatgaagaatgtgttgcaacaatgaggctttatatgagaatgagaaatcaatctcacaagaaagaagattaccctcttgcttctgatcctcaaaaccgcaataactttgcttcgtggaggcagaatgagttggagaggatgataccagaagagatgctggctatttcaaggtccgattactactgttggtgcctcgattga

SEQ ID NO: 309 - DNA, 1896 bp, Carica papaya
  source 1..1896: mol_type = genomic DNA
atggattaccaggcctctgaaaccctaaggtatatacgtatatgcatacacgtactactcttactagctaatttatacaccacatctggaagtaatcctttattaactaactaatatatatatatatatgtatatgtatatgcatcatgtaggaacaaatgtgcagcctgtttcaggcaattcaacaagatggagcacctggtggagcacatgaggatttcttatcactcggtgcatgagcccatgtgtgggatctgtaagaaacattgcagatcttttgagtctctaagggaacatcttataggtatgtaaagcatttatatctatatatatctgtatacacattttctaaaattcatggtgatatgatataatttgttttcatttaaatgtatatatatattagggcccttgcctaagcaagaatgcaagaacatattcagcgtccgaggatgcaaaatctgtttagcgatctttgacactcctaatgctcgttgggttcatcaagaaagatgccagctttctaatgcaaacactgtaattattatatttatatatacatattaatattcatatatattctgcatattttgttgtaatattttttattgaatttctactttgaacatacatatatatatatatataggggttagtgggtcgatttgcaaacttagggctgcgtgacaacttgactattgattgtgcgagccgaggtcctcaagtagttgcattggcttgcaagatggttgggggagggagtgatgggtccctagacctctgtgccagggtctgcatcaccgacgaatataataatatcatctttcattcttatgtcaagccaccgattccagtcacaaattacaggtatacacacacgtacacacacacacactatatatcataatgtatttggagacatcccttaatatcatctttgtgatgctaccaagtgaaattaattaatcggaagagttatccaacatatataaatagtgtaaatttttatatttaattagcatgaaattgtatatttatgcatttttatattaatcttatggtaatgacacctaatgatataataattattaattaaattttaattatatatgattaaatttaaggtatgagataacgggaattcgagctgaatacctgagagatgcaatgtcactaaggcaagtgaagaagaagattcaagattttctgtgcaacggagagccaatgtggaaaattagacccaaagcaggaagagcaaggattttagtgggtcatggtttggatcatgatcttgatcgtctacaaattgagtatccttctctcatgatcaggtatatgtatatatatgtttacacacacagaaaagagaattaattatattatattttctctatttgtctcgacaaagtctttgagatctattaagcaacactttatgtatatacatataaatatggatggaaatttatttgtgaattaatatagggatactgcaaaatacccgccattgatgaagacaagcaagctcagcaactcactcaagtacttaactcaagcatacctggggtgagaatttataagatgtttaattaattaaattaatatttatttatttattcatgaagtaaagaatctgtaatatatgtacgtgtgtatatatataggtatgagatacaaaatgggatacaagagccatatgaagaatgtgttgcaacaatgaggctttatatgagaatgagaaatcaatctcacaagaaagaagattaccctcttgcttctgatcctcaaaaccgcaataactttgcttcgtggaggcagaatgagttggagaggatgataccagaagagatgctggctatttcaaggtccgattactactgttggtgcctcgattga

SEQ ID NO: 310 - protein, 374 aa, Chenopodium quinoa
MTHARVNHHNPGHNHRVNHHHLHQTATTTVKVDEKWKVIEVARRKMNRERHRRLFSKNKCAACYRQFNRKEHLVDHMRTSFHSVHEPMCGVCKKRCRSFESLREHLIGPLPKVECAKIFSSRGCNICLTILDSPYTLRMHRGACQLSRPNALISSMANLKMCDNMKIDYGRERSPNVVALACKMVGGGNDGTLDICARVCLTDEYDNILFQTYVKPHIPVTNYRFETTGIRPDYLRDAMPLKQVQRKIQDFLCNGEPVWKIRSRGGKARVLVGHGLDHDLECLGMEYPALMLSYEIQIGVQDPYEDCVATMKLYMRMRSQNHKAEYYPLASDPQNRNNFAQWREAELEKMTPDELLAISRSDYYCWCLDLKGYM

SEQ ID NO: 311 - DNA, 1125 bp, Chenopodium quinoa
  source 1..1125: mol_type = other DNA
atgacccatgcccgcgtcaaccaccacaacccaggccacaaccatcgtgtaaaccaccaccatctacaccagactgccaccactaccgtgaaagtcgacgagaaatggaaggtgatcgaggtggctcgtcgaaaaatgaaccgggaacgccaccgtcggcttttcagcaaaaacaaatgtgctgcatgctatagacaatttaacagaaaggaacatttggtggatcacatgagaacctcctttcactctgttcatgaacctatgtgtggtgtttgtaaaaagcgttgccgatccttcgaatcattaagagaacatcttattggaccattaccaaaggtggaatgcgcaaagatatttagtagtcgaggatgcaacatatgcttgaccattttagatagcccttacaccctcagaatgcatcgaggagcatgtcaactctctcgaccaaatgcactaatttctagcatggcaaacttgaaaatgtgtgacaatatgaagatcgattatggtcgagaaagaagtcctaacgtagttgcgcttgcatgcaaaatggtaggaggtggtaatgacggaacacttgatatttgtgcaagggtttgcctaactgatgaatatgataacattttgtttcaaacatatgtcaagcctcatattccagtgactaactatagatttgaaaccacgggtatcagaccggattacttgagggatgcaatgccattgaagcaggttcaaagaaaaattcaagatttcttatgcaatggagagccggtgtggaaaattcgatcaagaggaggaaaggctagggttcttgttggccatggactagatcatgaccttgagtgcctaggaatggaatatcccgcattgatgcttagttacgaaatccagattggtgtccaagatccttatgaagattgtgttgctacaatgaaactctacatgagaatgaggtctcaaaatcataaggcagaatattatccattagccagtgacccacaaaatcgcaacaactttgctcaatggagggaagctgaacttgagaaaatgactccagatgaactattagcaatatcaaggtccgattactattgctggtgcttagacttgaagggatatatgtga

SEQ ID NO: 312 - DNA, 8980 bp, Chenopodium quinoa
  source 1..8980: mol_type = genomic DNA
atgacccatgcccgcgtcaaccaccacaacccaggccacaaccatcgtgtaaaccaccaccatctacaccagactgccaccactaccgtgaaagtcgacgagaaatggaaggtgatcgaggtggctcgtcgaaaaatgaaccgggaacgccaccgtcggcttttcagcaagtatgacttttttttggggggtttaaagtggttagattagccggagaaactgccgtttgacgacagtaaaccacagccacaaactggttaaccgtcacggtaaccggatttgggctttgattaccgtggtcaacctgagctgaaaatcggtcaccgtccacgataactggtttagggctccggttaccgtggtcaaccggagctaaaaaatcgtcacggtaaccggttttgacttacggtattagccatcgattttattaaaaaaaacgaaaaacagaagaaaaaaaaatccacgagaatacttacctccttttgaaatttacatggtacagcagggtgtaccatgctcatggtacacttggaagaaaattgtcattaaaaaaaaaaagttagcttcctaaatttatgctccttaattgaaggatttttgttattacctttccataattttagcttttcatatccataattgttcattcagtttttgaaaaaatagtaaattttagagtagaaataaaattccaagagaaaaaaataaattttttagagagaaaatgatggctcatgatgaattttcacgatatatgattgttgatttgcacttgatgatcaccaagttgatgtttttaacaaatgatatttaattttaaattttgtcaccaaatgagaaggtactttttaattaatttattttttatttatatttcataattttgttgttgatgatgatgtttttagattattatatttgttcatggatcattgttaacgaattcatcacggcaagaaaatgtaattttttttttttttggttatttagtttttttttttttaatttgtgttattttcgaatgttgaaaatgaagttcatttgaattgggataaatgttcttttatcagattttttgatccatattcattttttttaattggaatgaatacgttcattgagtttaattaatatattttttgggtctaaactatacgtttattgagtttaattaatatgttctttaatgatcaccagattgatgataattaattttagattttatcaccaaatgagaaggtagtttttaattattttttattcaatttatatttcataattttgttgttgatgatgatgtttttagattattatatttgttcatggatcattgttaacgaattcatcaccgaaagaaaatgtaatttttttttttaattattttagtgttttttttttaatttgtgttattttcggatgttgaagatgaagttcttttggattgggataaatgttcttttatcagtttttttgatccatattcatttttttttaattagaatgaatacgttcattgagtttaattaatatgttatttgggtctaaactatatgttcttcatagtcacaaactatgttctttggatttgaactatatgttctttacgttacaaactatgttcatctatttgtctatttttttcaaaaaaatattatctaattgtgtatatgtatatttttaatcatctaattgtgtatatgtataattttgttttataatagatcaggatcataaaggttgatgaagacgatatacttttgggacctcttctattgatgattgattttccgatagatttaaagaacattcgctatattgataaagaacatgatagtattatttaaataacattatttatatttaaccaacatgttaaaataaaattcagggaacatttgacaataagtatgaacattgtgtgacaataaaggtacactaaaattgcaatcaaagaacatggacatttaaaatcatataatgaacatcataataaatacacatgaccaaaatgaatattataacaaaatataaaaatatataattggttatttacagaattttttttaaaaaaagaaagagaacaggattaaaaaaaaatatattagaatttgaaattttgaaaataaaatcttcataaaaaataattttagagacaaaaattatagaaaactgaatattttgaaatgatttgacattaaatacgtggtaaaaatcaattggtgattatcttttaccttttttttaaattgattcaccaaaattaccacgttctttatatttcaatgttgtgttcttttataaagtcgtgatgtttattacaaatataagttatgttctttccgctttttattttaactagttttgatccggatttaccatgcgcacggtacacccgagtataccaaccaacgattacctcctttccagccattccgccacctgaaccgccgcctcttgacatctgcctgaccagccgcctgctttcgcgtcgccgccagcaacttctgccggtaacctctactatgtggttgtggtggttgtgtggaacaaggttggtggttggggtgttagtttgatgagagagaaaataaaaataaaaaaaaataaaaataaaaaagggggagaaaaaatgggttagggtttagtaagggtaatgatgaccctttgcttgaaatgatggcggttttgatgaatttggatggcggtatttaacacccctttataactgcatgaaaatctcattttcagaaatttaccatgagatccactctagtggattattacagttaatttccttacatataaatcataaaataactatcaaagctagtcgaaggggagtatatgaatagtgtgaatgaaggttatagtgttgcaagtaaaaaaatgagggagctgaggtattatttttctttcttactaatatttaaataaatttctaagctactaactattttttataataatataatattctcactgtgcactgcctattattgcaattaatcaaaaactaggaattgtcagtatataaaattttgttaaataacgaaaattttgatttttaacaccacaaaaaaattttaaaaattcgattttaccaccacttgacggattcttggatgaacccgttagtggggcctacaattcccacatgtcatcatataattggttaaaaaaataaaaaatcaaaatcctaaaactaacccagccaccccacccccactgctgatcgcccctgccccacctccaacaccccttttcacaaccctagccactagaaactccgccacctccctttctcctaccccaaaatcggcagcttcccccaaacggccaccaaaaacgccgaaagtggtcgaaattgaccggtttagggtcgatatcgaccactcaggccctcaaccggctgatttcgaccgttagtgactgatttcgtggccatttttgggaaagggaggggagggttccggtggggcgagttcaagctaggggagggggtgcgtcggaggtagggcaaggaacgtcggctgcgttgggtaggggtggagaaaagggtggctggattagttttaggcttttgtgagaagggtcactaaagaaattaaggataaaaaaaatggattatatagtttgacaattgaaagagtcaaagagtacattagtaccaaactttctttagatctttgtctaccgactttaactcctcaaatgatagagaattatatagctcaaaaaatgaatgaggacataaaagccgctatataataaatactttttttgtatgtctttcaaacgtaatcttgcatattcaaagggaatctagtcaaaatttgaccatcccttttaaaaaaaaaaaaaaaaaaaaatatatgggctttcgaaggaatcaataagatcataaagttaagcaaatacatagattcccttcaatgcactccacattcttataaccgtgtttaaaacctttagtgctatccacatcaaaaaggctaacttgttaagaggtgaagataatattacaatgaaaaaaacatgtaatttcgcaaatattaatcatcgtaccctctagttaatcgtatattaattaggagatgattataaaatttcaagaaaaattcaaaaattaataatgttctctcgtgacatatatgaataaatggtaattatataatgattaaaaccacaagtttattttgtggttccaacagcaaagaaatcgcttagcttattgagaacattatatatatgccaaatccactagagtgttgatacgtatgcacggggcagcttttgaccatctatgggaaccaagaaagcatcctctttttattcatcattgcatgtaagcaatattaacctgtgtggaatactagtacatgataaatctataacgacaaagcctgttccaacatacaagtcatattcgagaccaaaagttgtacaatgggatcaccaaccagctcaggtagcatattgcaacaataaagataactcacggtcaaaataagttctagagtaatctagccattgacaccatactcttaagcacaatgaaattaaaccataccttatattggcgtgtaatgctcccttctcttagcttattgattgtataagccaaaagggaccattattagtggcctataatctctaaagaagccttgattagagcttgtaaaagtggggacaacttaaaagctaaggtatcatcagaaattatagagaatattgtcaatagaatggaagtcacaaagccatatatacgtgcatgttaaagctatggaaccatagcatggaccatatattcatttctctttgactttgggtatctttcaaagttcaaaaaattatctcttgaggcccacctcagtcaaatggcatactctagtctaggctgacatcctccgaacatttcactgcctctaatagcttgagtcataaatgcctctaatagcttgagtcataaggttggtattaaaatgtctttataaaatgacaaagaattttgatgatattttgcaattgttggtattaatgaagaagtattatattttggtatcatggcaataccatctaaccacaatttaataccaacaaatattatttgagtcattcatgactcaagctattagaagcagagaatttctcgacattccccatgctcattttcaaaagtacacaaatccctcccttcctagctctctttccacgacgtacaaatggtagcacatattgtagctgatacgcggcaaattaaaaccaatgaaaaagagatacgctgacataatatggtagtagattatagattcttttgtttcttaattgtagaaacttgaaatataaaataataaccattacatgcaaattatttatttgtcgagttgtcattttagccacgtataactgctagtattactttgattaagctgcaagattgacaaaaaggatagtaaggaatataaccctattcgaatgcactgatcattttattgcatgcgaacaaaaatcggtccatgatgacattatccttgaggaatctcagatttttatcttcctttttgctgcctttcaactgatataaattttgagctttgtaaccctcaaacctcaatcttttcttacattgttattgtctacgctcacacatcaagagcgcgagcattattgaactcccttcaaccgacaacaaaccatcatggactacagatcaattgagtcttctgaatcctcaaggcatttttctactctatacattctctatcataaaatgtttgcagaagtttttttttttttttttttttttgttaaacttgttgcatattgccatatatcatgattttatgtttcatgtttatgtaaatattgatgcatagttgtattatcaatgtcaagtagacgggtataaacgttaccaaaatatatcatccaatcaatatgatttgatcaaattaaacaagtttgctcgacctactattagtaatctaattatgtatgttcttagtacatgtaattgtgagttcaatgaagtccaaagtaggaatatctaacgtacttttagctttggaacttaattaaaaaaacaatttcaggaaaaaaagaatgaaatgtttataaaattccttattttctttcttaagaaaccctagatatgatatgtttctcctctcttgttcgttgtccctatgattttgagttcatctcaactctgctcgctatataacttggaagaaaattaatccaatgtcttctttagtcttcactataataaactcatggaaagtaatcaagtatatttctttttccctttcttctactttctattttggtcacttgcaaatttaagtcttctattgcctatccttttcttgtgttctagttttactaataattatagacagattcattattttaaaagataatgaacatcgatcataatacttttacatattattatctctcaagctaatttcgagagttctttaaagtcaagttttgtttcagtattatgttgactgaattgaaattatctcatcacatttatgttcttgtttaaaaatataatttcatttagtagcttatcatctcatcttgaaatgttatctaacattaaagctttatgtaatgcagaaacaaatgtgctgcatgctatagacaatttaacagaaaggaacatttggtggatcacatgagaacctcctttcactctgttcatgaacctatgtgtggtgtttgtaaaaagcgttgccgatccttcgaatcattaagagaacatcttattggtaggtttatatcctataatattactatctccgtttcatattatgtgcaacatttattaaaaacagttgtatgctatgcaacaaatgttttctttcttttttaagctgtcacttctcgctatctatctcctcattatcacatgcatcattatctttctctctccatttaacactcacggacaaattttgcctatctatattgttttcacaggaccattaccaaaggtggaatgcgcaaagatatttagtagtcgaggatgcaacatatgcttgaccattttagatagcccttacaccctcagaatgcatcgaggagcatgtcaactctctcgaccaaatgtaatgactttagcttggaaaaacaaatgtaacaaattaatagtatttccatcaaaactttgtaaattgaacctttttttttttttttttatgcaggcactaatttctagcatggcaaacttgaaaatgtgtgacaatatgaagatcgattatggtcgagaaagaagtcctaacgtagttgcgcttgcatgcaaaatggtaggaggtggtaatgacggaacacttgatatttgtgcaagggtttgcctaactgatgaatatgataacattttgtttcaaacatatgtcaagcctcatattccagtgactaactataggtaacttttattttcgacattagtttctctactagcttgatttaaattatcttatacacgactcattcacttattgtatttcgtgtgtagatttgaaaccacgggtatcagaccggattacttgagggatgcaatgccattgaagcaggttcaaagaaaaattcaagatttcttatgcaatggagagccggtgtggaaaattcgatcaagaggaggaaaggctagggttcttgttggccatggactagatcatgaccttgagtgcctaggaatggaatatcccgcattgatgcttaggtatgaactatttccttcgtttcttaatatttgcatcaattaaatatacacgtttttcaatgcatcaattatatttagataataatacatattgagattaactcaccattaaaataataaaatttatttatgcttcgtgtacattattagttgtaaaatatggtcaaagttagtataataagagtgtataagttaattgatacaaatattaagaaacaaaggaagtatattgacaattattaatcacgtgcatataaatgagttcataactaatataagtcatttgatggtttgatttaatttgattatatataagtgctcaatatctctttctaatcaaactttgatgatataaatttgtttgttgggaattggtagaattatattgagaaaagtcaaggttgttacacaagggaaatgataaaaaaagaatatatagagcacaaacaatttgtagttgtgagggtccttagggttttaaatatcttgcaaagaaacttaattgtagattcgttctatctagcaagctaagtaagtgatatatatatatatatacttattaaaaaaaaaaaaaaaaccttctcgaatattttctttcagtaaaatacatatgcttcctccgttttttttttttacttgcaacactttgacttctacactattcatatactctaattcgactagctcttataattaaaagtaaaggaagtaatatttaaattttggagtatgcatccctaaacactgttgaatgatgacaatgaaaataagtaccataagcttcaaaatgcatatactaatgtggtattttggtctgcagggatacctcaaaatatcctcctttgatgaaaacaagcaagctcagcaactcacttagatatctaacacaagcatatttagggcaagtacctcttaagtcttaactaagtatatggttctttatatatgttgtttgtaaactcgctctttcatatttactgataatatttacgttacagttacgaaatccagattggtgtccaagatccttatgaagattgtgttgctacaatgaaactctacatgagaatgaggtctcaaaatcataaggcagaatattatccattagccagtgacccacaaaatcgcaacaactttgctcaatggagggaagctgaacttgagaaaatgactccagatgaactattagcaatatcaaggtccgattactattgctggtgcttagacttgaagggatatatgtga

SEQ ID NO: 313 - protein, 298 aa, Chenopodium quinoa
MRTSFHSVHEPMCGVCKKRCRSFESLREHLIGPLPKVECAKIFSSRGCNICLTILDSPYTLRMHRGACQLSRPNGLISSMANMKICDNMKIDYGRERSPNVVALACKMVGGGNDGTLDICARVCLTDEYDNILFQTYVKPHIPVTNYRFETTGIRPDHLRDAMPLKQVQRKIQDFLCNGEPVWKIRSRGGKARVLVGHGLDHDLECLGMEYPALMISYEIQMGVQDPYEDCVATMKLYMRMRSQNHKAEYYPLASDPQNRNNFAQWREAELEKMTPDELLAISRSDYYCWCLDLKGYM

SEQ ID NO: 314 - DNA, 897 bp, Chenopodium quinoa
  source 1..897: mol_type = other DNA
atgaggacctcctttcactctgttcatgaacctatgtgtggtgtttgcaaaaagcgttgtcgatccttcgaatcattaagagaacatcttattggaccattaccaaaggtggaatgcgcaaagatctttagtagccgaggatgcaacatatgcttgaccattttagatagcccttacaccctcagaatgcatcgaggagcatgtcaactctctcgcccaaatggactaatttctagcatggcaaacatgaaaatatgtgacaatatgaagattgattatggtcgagaaagaagtcctaacgtagttgcgcttgcatgcaaaatggtaggaggtggtaatgacggaacacttgatatttgtgctagggtttgcctaactgatgaatatgataacattttgtttcaaacatatgttaagcctcatattccagtgactaactatagatttgaaaccacgggtatcagaccggatcacttgagggatgcaatgccattgaagcaggttcaaagaaaaattcaagatttcttatgcaatggagagccggtgtggaaaattcgatcaagaggaggaaaggctagggttcttgttggccatggactagatcatgaccttgagtgcctaggaatggaatatcccgcattgatgattagttacgaaatccagatgggtgtccaagatccttatgaagattgtgttgctacaatgaaactctacatgagaatgaggtctcaaaatcacaaggcggaatattatccattagctagtgacccacaaaatcgtaacaactttgcacaatggagggaagctgaacttgagaaaatgactccagatgaactattagcaatatcaaggtctgattactattgctggtgcttagacttgaagggatatatgtga

SEQ ID NO: 315 - DNA, 2292 bp, Chenopodium quinoa
  source 1..2292: mol_type = genomic DNA
atgaggacctcctttcactctgttcatgaacctatgtgtggtgtttgcaaaaagcgttgtcgatccttcgaatcattaagagaacatcttattggtaggttaatttatatctaataatatagttactatctgtgtttcatattatctgcaacatctactaaaaacagttatatcattatctttctatctccatttaacactcacgaaacaaattttgtctatataggaccattaccaaaggtggaatgcgcaaagatctttagtagccgaggatgcaacatatgcttgaccattttagatagcccttacaccctcagaatgcatcgaggagcatgtcaactctctcgcccaaatgtaacgactttttattagcttggaaaaacaaatgtaacatattaatagtatttccattgataaaaactttgtaaattaaaacctatgcccttttttatacgcagggactaatttctagcatggcaaacatgaaaatatgtgacaatatgaagattgattatggtcgagaaagaagtcctaacgtagttgcgcttgcatgcaaaatggtaggaggtggtaatgacggaacacttgatatttgtgctagggtttgcctaactgatgaatatgataacattttgtttcaaacatatgttaagcctcatattccagtgactaactataggtaactttaattttcgacataaatttctctactgctccctccgtttcataattagaagtctatttctctttatgatgtgagtaatagatgtttgaaatagggttctaattatgaaacggagggagtatcttgatttaaactattttatatgccgactcattcacttattgtatttcgtgtgtagatttgaaaccacgggtatcagaccggatcacttgagggatgcaatgccattgaagcaggttcaaagaaaaattcaagatttcttatgcaatggagagccggtgtggaaaattcgatcaagaggaggaaaggctagggttcttgttggccatggactagatcatgaccttgagtgcctaggaatggaatatcccgcattgatgattaggtatgatgaactactttctccaatctccatttctaagtatttgcatgatcaattgactatatttgtcaatgcactactttgactttttttttttttttgagacaattaatatctttacttatgctttattaaaattatattttgaaaatatatattgagattagttaattcaatgacaattaaaatcatgaaatttattatactttttatacattatcattagtgctaaaatatgatcaaagttagtataagaagagtataaaaagtcaataaacggaggaagtatattgataatgcattatcacatacaaataaatgagttcataactaattacagtcatttgatggtttgatttgattgtatataagtactcaatatctctcttaaatcaaatttagataatatttgttggttgggaatggtagaattatattgaggaaagtacaaggttgttacacaagggagattgtgagggtccttggggttttaaatttcttgcaaggaaacttaattgtagatttgttctatctagctagcaagctaagtaagtgatgtatatactataaaatgatttattttttttttaaaaaaaaaaaaaaaaaaaaaaacctttctccttcagtaaaatagatatactttctacgttttttttttacttgcaatgctttgacttttacaatattcatactctactttgactagctctaataatttattgaatgatgacaataaaaataataagtaccataagcttcaaaatgcatgcatatactaatgtggtatattatatttttggtcaacagggatacctcaaaatatcctcctttgatgaaaacaagcaagctcagcaattcacttagatatctaacacaagcatatttagggcaagtacctcttaactaagtatacggttctttatatattttgttagtaaactcgctctttcatatttactgataatatttatgttacagttacgaaatccagatgggtgtccaagatccttatgaagattgtgttgctacaatgaaactctacatgagaatgaggtctcaaaatcacaaggcggaatattatccattagctagtgacccacaaaatcgtaacaactttgcacaatggagggaagctgaacttgagaaaatgactccagatgaactattagcaatatcaaggtctgattactattgctggtgcttagacttgaagggatatatgtga

SEQ ID NO: 316 - protein, 343 aa, Malus domestica
  SITE 123: note = X can be any naturally occurring amino acid
MESRVESSETLRNKCAACYRQFNRIEHLVEHMRTSYHSSHEPMCGICKKHCRSFESLREHLIGPLPKQECRNIFITRGCKICLAILESPYALRVHQDRCQLSGGNAGLLGRFANLGIRDNTEXGSTRGTQVVALACKMVGGGSDGSLDLCAKVCLTDEYDNIIFQSYVKPLLPVTNYRYETTGIRPEYLRDAMPLRQVQKKIQDFLCNGEPMWKIRPRGGKARILVGHGLDHDLDSLQFEYPQGYCKIPSIDENKQAQQLTQVSHTSISWASIQDPYEDCVATMKLYMRMRSQVHKVEAYPLASDPQNRNNFAAWRQNELERMSPDQMLEISRSDYYCWCLDS

SEQ ID NO: 317 - DNA, 1032 bp, Malus domestica
  source 1..1032: mol_type = other DNA
atggagtctagagtcgaatcatcagaaactctgaggaacaagtgtgcagcatgctatcgacagttcaatcggatcgagcacttagtggagcacatgagaacctcataccactcatctcatgaacccatgtgtggaatttgtaagaagcattgcagatcttttgaatctctcagagaacatcttatagggccactgccaaaacaagagtgcagaaacatattcatcactagaggatgcaaaatctgcttagccatcctcgaaagcccgtatgctcttagggttcaccaggacagatgccaactctctggtggaaatgctggattacttggtcgctttgctaatctgggcattcgtgacaatactgaargtggtagcacaagaggcactcaagttgttgcactggcttgcaaaatggttggtggaggcagcgatggctccctggatctctgcgcaaaggtctgcctcactgatgaatatgacaacatcatcttccagtcttatgtcaagccactgcttccagtcacaaactataggtatgaaacaactggtattcgtcctgaatacttgagggatgcaatgcctttgaggcaagtgcaaaagaagattcaagatttcctctgcaatggggaaccgatgtggaagattcgaccccgaggtggaaaagctaggattcttgtgggccacggtttagatcatgaccttgactccttgcagtttgaatacccacaaggatactgcaaaataccctccattgatgaaaacaagcaagctcagcaactcactcaagtatctcacacaagcatatcttgggcaagcattcaagatccttatgaggattgtgttgcaacaatgaagctctacatgagaatgagatcccaagttcacaaagtagaggcatacccactcgcttctgacccgcaaaaccggaataacttcgcggcgtggcgccaaaatgagcttgagaggatgagcccagatcaaatgctggaaatctcaaggtctgattactactgctggtgcctggactcttag

SEQ ID NO: 318 - DNA, 2332 bp, Malus domestica
  source 1..2332: mol_type = genomic DNA
atggagtctagagtcgaatcatcagaaactctgaggttatctctctctctctcaacacacacgtaaatatcastgcatgcacatttctttcagcttaattaagttgaaattaatttttcgatgaatcatggatgattagtatgtaaactaatgatgacaatattatatatgtgacgattaatcaggaacaagtgtgcagcatgctatcgacagttcaatcggatcgagcacttagtggagcacatgagaacctcataccactcatctcatgaacccatgtgtggaatttgtaagaagcattgcagatcttttgaatctctcagagaacatcttataggtaactaaaacaatttatgcagaactgagcttatagccaagtwaactattacwgtgktttcctctttctgcatccaagttcaaatccttctctccgcttagattaatttagagtaaactatatcacttatataaaaaacagttatcaattacataaactaatatcccaaatttcttttgcaaatcatagttctatwttctttttccagggccactgccaaaacaagagtgcagaaacatattcatcactagaggatgcaaaatctgcttagccatcctcgaaagcccgtatgctcttagggttcaccaggacagatgccaactctctggtggaaatgctgtattaatcctcacacactagcttattaatcatgaactttttgccgaaaccctatttgttataaattaaaattcattccatattgtatatttcagggattacttggtcgctttgctaatctgggcattcgtgacaatactgaargtggtagcacaagaggcactcaagttgttgcactggcttgcaaaatggttggtggaggcagcgatggctccctggatctctgcgcaaaggtctgcctcactgatgaatatgacaacatcatcttccagtcttatgtcaagccactgcttccagtcacaaactataggtatatatgcatttatatagagatttatactaactagtatgtacgtaagtagcgaatatatataagaaagtggtttccgtggtctactctttattcctgaccgtcagatggaacaaaacaaaaggcaaagatagggtggaaatyggacaaagattgtctgccctcycacttccgatgccctcytgttttgtatgrtcacggttaagycacgttaacattttatattgtttttttatagagataataagacaaaaatgaatagtaatataaaatgttgatgtggcttaaccgtgaccacataaacaggagggcaygrgagggcaccggaagtgggagggcagacaatccttgtccgtcgaaatcatactttctcagtaaagatgtcatttttttatgatttagcgatttgaccgaccattttgttgtatacttgtataatacaggtatgaaacaactggtattcgtcctgaatacttgagggatgcaatgcctttgaggcaagtgcaaaagaagattcaagatttcctctgcaatggggaaccgatgtggaagattcgaccccgaggtggaaaagctaggattcttgtgggccacggtttagatcatgaccttgactccttgcagtttgaatacccacaagtaatgattaggtaattcaacttatttttctttcatccaaacaaaaaacctatttatcattttatgtacagagaaaattgttattgacaattaaaaagtcttaaaataaataagatcacatattgagttgcacacctattaattggcagcaaatcatttgtgtatgtacacacacgcgcacatcgtttgtgtatgtacacacacacgcgcacacacacacgcgcgcacacacacaaccttccattccgaatttcaattataattttagttctaaatgtgactgactgtgtatagggatactgcaaaataccctccattgatgaaaacaagcaagctcagcaactcactcaagtatctcacacaagcatatcttgggcaagtacccaaccctactattaattccctatatatagatcaattctagctacaaataagttattactaatgcaattttcacatataatctatataggtatgaaattcaaacaggcattcaagatccttatgaggattgtgttgcaacaatgaagctctacatgagaatgagatcccaagttcacaaagtagaggcatacccactcgcttctgacccgcaaaaccggaataacttcgcggcgtggcgccaaaatgagcttgagaggatgagcccagatcaaatgctggaaatctcaaggtctgattactactgctggtgcctggactcttag

SEQ ID NO: 319 - protein, 329 aa, Malus domestica
MEYKVESTETLRNKCAACYRQFNRIEHLVEHMRTSYHSAHEPMCGICKKHCKYFESLREHLIGPLPKQECRNIFSTRGCKICLAILESPDYLVALLIWGIRDNTESGSTGGTQVVALACKMVGGGSDGSLDLCAKVCLTDEYDNIIFQSYVMPLIPVTNYRYETTGIRPEYLRDAIPLRQVQKKIQDFLCNGEPKWKIRLRSGRARILVGHGLDHDLDSLQVEYPQGYCKISSIVEIKQAQQLPQVSHTSISWASIQDPYEDCVATMKIYKRMRSQVHKVEAHPLASDTQNRNNFAAWRQNELERMSPDQMMEISRSDYNCWCLDSYSG

SEQ ID NO: 320 - DNA, 990 bp, Malus domestica
  source 1..990: mol_type = other DNA
atggagtataaagttgaatcaacagaaactctgaggaacaagtgtgcagcatgctatcgacaattcaatagaatcgagcacttagtggagcacatgagaacctcataccactcagctcatgaacccatgtgtggaatttgtaagaagcattgcaaatattttgaatctctcagggaacatcttatagggccattgccaaaacaagaatgcagaaatatattcagcaccagaggatgcaaaatctgcttagccatcctcgaaagcccggattacttggtcgctttgctaatctggggcattcgtgacaatactgaaagtggtagcacaggaggcactcaagttgttgcacttgcttgcaaaatggttggtggtggcagcgatggctcactggatctctgcgcaaaggtctgcctcactgatgaatatgacaacatcatctttcagtcttatgtcatgccactgattccagtcacaaactatagatatgaaacaactggtattcgccctgaatacttgagggatgcaatccctttgaggcaagtgcaaaagaagatccaagacttcctctgcaatggggaaccaaagtggaagattcgactccgaagtggaagagctaggattcttgtgggtcacggtttggatcatgaccttgactctctgcaggttgaatatccacaaggatactgcaaaatatcctccattgttgaaatcaagcaagctcagcaactccctcaagtatctcacacaagcatatcttgggcaagcattcaagatccttatgaggattgtgttgcaacaatgaagatctacaagagaatgagatcccaagttcacaaagtagaggcacacccgctcgcttctgacactcaaaaccggaataactttgcggcgtggcgccaaaatgagcttgagaggatgagcccagatcaaatgatggaaatctcaaggtctgattacaactgctggtgcctggactcttatagtggctga

SEQ ID NO: 321 - DNA, 2143 bp, Malus domestica
  source 1..2143: mol_type = genomic DNA
atggagtataaagttgaatcaacagaaactctgaggttatctctctctctctctctcaacacatacagaaatatcactgcattcacatttctttcagcttaattaagttgtaacttgtaagtaatttttttgattaatcatggatgattagtatataaactaatgagaattatatatatgcggtgattaatcaggaacaagtgtgcagcatgctatcgacaattcaatagaatcgagcacttagtggagcacatgagaacctcataccactcagctcatgaacccatgtgtggaatttgtaagaagcattgcaaatattttgaatctctcagggaacatcttataggtaactaaaacaaactatgcagatcaactgagcgtagccaagttgactataaactgtgttttctctttctgcatcaaagttcaaatccttctctccatagcttaaattaatttagagtcaactatatctcttatacaaaaaaacagttattaattacataatcccaaatttcttttgcaaataataatcctattatttctattttcagggccattgccaaaacaagaatgcagaaatatattcagcaccagaggatgcaaaatctgcttagccatcctcgaaagcccgtatgctcttagggttcaccaggacagatgccaactctctggcggcaatgctgtattaatcagcacacactaccttattaattatgaccttttgcccaaaccctatttgctataaatttaaattgattccatataatgcatttcagggattacttggtcgctttgctaatctggggcattcgtgacaatactgaaagtggtagcacaggaggcactcaagttgttgcacttgcttgcaaaatggttggtggtggcagcgatggctcactggatctctgcgcaaaggtctgcctcactgatgaatatgacaacatcatctttcagtcttatgtcatgccactgattccagtcacaaactataggtatatatgcatttatatgaagaattatactaactaatatgtaacgtatgtagcgtatatatgtaggggaatgatttcagggtctcttctttatttctaactgtcggatggaacaaaacaaaagacgaagatattgtgaaaattgtacttcctacaataaagatgttgttgctttaagagaatatggtcatcatttcggagtgtgatttagcgattgaacgggttcattttttatatacatgaccgatcattttgctttatacttgtatatatacagatatgaaacaactggtattcgccctgaatacttgagggatgcaatccctttgaggcaagtgcaaaagaagatccaagacttcctctgcaatggggaaccaaagtggaagattcgactccgaagtggaagagctaggattcttgtgggtcacggtttggatcatgaccttgactctctgcaggttgaatatccacaagtaatgattaggtaattcaacttatttttctttcatccaaacaaaaaatatccattttataaaatcatcagactctcttcgatcaatgaaaagaaaataaaagacaacgaagtgcacaatgactattttaaagtactaattaacaattatctatatatatttataaaagtataggatcacatatatacacatacaactttccattgcgaatttcaattgtaattctagttctaaacgtgactgactgtgtatagggatactgcaaaatatcctccattgttgaaatcaagcaagctcagcaactccctcaagtatctcacacaagcatatcttgggcaagtacccaaccctactattagttccctatatatataaatataaattctagctacatattagtactaatgcaattttacatataatcttattaggtatgacattcaaacaggcattcaagatccttatgaggattgtgttgcaacaatgaagatctacaagagaatgagatcccaagttcacaaagtagaggcacacccgctcgcttctgacactcaaaaccggaataactttgcggcgtggcgccaaaatgagcttgagaggatgagcccagatcaaatgatggaaatctcaaggtctgattacaactgctggtgcctggactcttatagtggctga

SEQ ID NO: 322 - protein, 354 aa, Citrus sinensis
MDYRTESSETLRNKCAACFRQFNRLEHLVEHMRTSYHSVHEPVCGICKKHCRSFESLREHLIGPLPKQECKNVFNNRGCRFCLAILDGPNARRLHQERCQMVSSATTGLNARLANLGVRDSLTIDNTHTRDPQVVAIACKMVGGGSDGSLDLCGRVCIIDEYENIIFHAYVKPPIPVTSYRYETTGIRPEHLRDAIPLKQVQRKIQDFLCNGEPMWKIRPRGSRARILVGHGLDHDLDRLQVEYPAIMTRDTAKYPPLMKTSKLSNSLKYLTQAYLGYDIQIGIQDPYDDCVATMRLYMRMKSQAHKREDYPLASDPQNRNNYASWRQTELERMSPEEMLAISRSDYYCWCLDR

SEQ ID NO: 323 - DNA, 1138 bp, Citrus sinensis
  source 1..1138: mol_type = other DNA
atggactacagaacggagtcttcagaaaccctaaggaacaagtgtgcagcatgcttcagacagttcaacagattggagcacctggttgagcacatgagaacttcatatcattcggttcatgaacccgtgtgtggaatttgtaagaaacattgcagatcttttgaatctctgagggaacatcttatagggccactgccaaagcaagagtgcaaaaacgtattcaacaacagaggatgcagattctgtttagccatcctcgatggccctaacgctcgtaggcttcaccaagaaagatgccagatggtctcaagtgcaaccactggactgaatgctcgcttagccaacttaggcgttcgagacagcctaaccattgacaatactcatacaagagatccgcaagtcgtagcaatagcttgcaaaatggttggtggaggcagtgatggctctcttgacctttgcggaagggtctgcatcattgatgaatatgaaaacattatcttccatgcttatgttaagccgccgattccggtcacaagttataggtatgaaacaacaggcattaggccagaacatctccgcgatgcaattccactgaagcaagttcaaaggaagattcaagatttcctttgcaatggggaaccaatgtggaaaattagacctagaggtagcagagctaggattctagtgggtcatggcttggatcacgatcttgatcgtttgcaagtagaatatccagcaataatgacaagggatactgcaaaatatcctccactgatgaagacaagcaagcttagcaattctctcaaatatttaacacaagcatacctaggatatgacattcaaattggtatacaagacccgtacgatgattgtgttgcaacaatgaggttgtacatgagaatgaaatctcaagctcataagagagaggactatccacttgcttctgacccgcaaaacagaaataactatgcatcatggaggcaaactgagcttgagaggatgagtcctgaagaaatgctagcaatctcaaggtctgattactactgttggtgcttggaccgatgatctgcaaatggtagggcgtggtagccagaggaacaaaattgatgcgggatattgaagaggcttctagttaaac

SEQ ID NO: 324 - DNA, 1790 bp, Citrus sinensis
  source 1..1790: mol_type = genomic DNA
atggactacagaacggagtcttcagaaaccctaaggtatagactaccctcgtacatccctttttactcctcaacacccacaatcagcatatgatctttctacatgaaatcgattgaataaaattgttccgtaataattagtaacttgattgatcttaatttattaccacaatcaggaacaagtgtgcagcatgcttcagacagttcaacagattggagcacctggttgagcacatgagaacttcatatcattcggttcatgaacccgtgtgtggaatttgtaagaaacattgcagatcttttgaatctctgagggaacatcttataggtaaatttactttcaatttgtccatggattattttgtaacttcctatataagtttagtttatcaatcagcaatcctgatattcgcaatacaattaattacagggccactgccaaagcaagagtgcaaaaacgtattcaacaacagaggatgcagattctgtttagccatcctcgatggccctaacgctcgtaggcttcaccaagaaagatgccagatggtctcaagtgcaaccactgtattactcttttaatttaccttgcaatacttattgttaaatattcatacttaattaatcagatcaaattgatcttattgtcaacttcacgtgttctagggactgaatgctcgcttagccaacttaggcgttcgagacagcctaaccattgacaatactcatacaagagatccgcaagtcgtagcaatagcttgcaaaatggttggtggaggcagtgatggctctcttgacctttgcggaagggtctgcatcattgatgaatatgaaaacattatcttccatgcttatgttaagccgccgattccggtcacaagttataggtaccaatatgcatatacttatgtatatatatacacattttgatgatttcaggagcacaaattaactgtacttttagtaaatcttacattcttgaaacttgtgtcctaggtatgaaacaacaggcattaggccagaacatctccgcgatgcaattccactgaagcaagttcaaaggaagattcaagatttcctttgcaatggggaaccaatgtggaaaattagacctagaggtagcagagctaggattctagtgggtcatggcttggatcacgatcttgatcgtttgcaagtagaatatccagcaataatgacaaggtaaatttaagttgaaattaaacatgccagccacaaaactttattaccatgaaactcttatgataattaatctgctaagaaaatgtatacataatgctcttatcattatcagggatactgcaaaatatcctccactgatgaagacaagcaagcttagcaattctctcaaatatttaacacaagcatacctagggtaagtgccatatatgtttgtacatttttttcccccaaactttctagataaatgatttttatatattactctccataattctctatgcagatatgacattcaaattggtatacaagacccgtacgatgattgtgttgcaacaatgaggttgtacatgagaatgaaatctcaagctcataagagagaggactatccacttgcttctgacccgcaaaacagaaataactatgcatcatggaggcaaactgagcttgagaggatgagtcctgaagaaatgctagcaatctcaaggtctgattactactgttggtgcttggaccgatgatctgcaaatggtagggcgtggtagccagaggaacaaaattgatgcgggatattgaagaggcttctagttaaac

SEQ ID NO: 325 - protein, 353 aa, Citrus sinensis
MDTEAELPKRSTARHKCVACYKQFKRKDHLIEHMKISYHSVHQPKCAVCQKLSKSFESLREHLTGPLSKAHCSGIFSDRGCNLCMNIFDSPSSLIKHKEACSLSAPVPFEKTLSNAESQKKISGAIDEKRTCRGPKAVAMDCEMVGGGSNGTLDLCARVCLVDEDENVIFHTYVQPQLPVTNYRYEVTGLTEEDIKNAMPLKEVKDKILEILNNGESTGRLMLDDGKARLLVGHGLEHDLDSLRMNYPDHMLRDTAKYRPLMKTNLVSHSLKYLTRTYLGYDIQSGVHDPYEDCVSVMRLYKRFRRQDHQVEEIGNQNTTGSFDSYKYKELEKMSPNELYQISKSDYRCWCLD

SEQ ID NO: 326 - DNA, 1151 bp, Citrus sinensis
  source 1..1151: mol_type = other DNA
tgaaatttccgagtcatcaggtgttgaaatggacactgaagcggagcttccgaaaaggtcaacggcaaggcacaaatgtgttgcgtgctacaaacaatttaagcgaaaggatcatcttattgagcacatgaaaatctcataccattcagttcatcagccaaaatgtgctgtctgtcaaaaactctctaaatcttttgaatctctgcgggaacatcttactggtccattatcaaaagcacattgttcggggattttctctgacagagggtgcaatctttgtatgaatatttttgatagccccagttctcttatcaagcataaagaagcatgttccctttctgcacctgttccctttgaaaaaacactgtctaatgcagaatctcaaaagaaaatttcaggggcaattgatgaaaagcgcacatgcagaggtcccaaagcagttgctatggactgtgaaatggttggtggtggaagcaatggaacacttgatctttgtgctagagtttgccttgttgatgaagatgagaatgtaatttttcacacatatgttcaaccccaacttcctgtcactaactacagatatgaagtaactgggttgactgaagaggatataaaaaatgccatgcctcttaaagaagtgaaggataaaattttggaaattttgaacaatggagagtctaccgggaggcttatgttggatgatggaaaggccagacttcttgtgggtcatggtctagagcatgatttggatagcttgaggatgaattaccctgatcacatgctgagggatactgcaaaatatcgtccattgatgaagacaaatctggttagccactcgctcaagtacctcaccagaacgtatctagggtatgatatacagtctggggtgcatgatccatacgaagattgtgtatctgtcatgagactgtacaagagattccgcagacaagatcatcaggtagaagaaattggaaaccaaaatactaccggcagttttgattcttacaaatacaaggagcttgagaagatgagcccaaatgaactgtaccagatatcaaaatcagactatagatgctggtgcttggattagtatggagccttagcttgtgtacctctgctttcttcatctctatgtatatagcaatttttat

SEQ ID NO: 327 - DNA, 2957 bp, Citrus sinensis
  source 1..2957: mol_type = genomic DNA
tgaaatttccgagtcatcaggtgttgaaatggacactgaagcggagcttccgaaaaggtcaacggcaaggtaacactctctcaattacattttgctaaaagaggcaacggtcgatacagcaaaaatgagggttttgactttttgagaataattagttaatgcaattttgagctatttacctttttgggtcatcagaatttacccttcttatagttatgtactcgtcttcttagctttgtaaagtctaatgggtgattttgtcagctctggtgattgcatttgctgtgtcggtgcttcgttgtttttgtgtgctacacttgttgagacaatggtcatgggtaatgtgactcctgtgcttacattactttcaggcacaaatgtgttgcgtgctacaaacaatttaagcgaaaggatcatcttattgagcacatgaaaatctcataccattcagttcatcagccaaaatgtgctgtctgtcaaaaactctctaaatcttttgaatctctgcgggaacatcttactggtaaaatatattttcatgttcattctgattggtccattcgtcagttgcttattttgttttccttcttataggttcttattttattttccttcttataggtccattatcaaaagcacattgttcggggattttctctgacagagggtgcaatctttgtatgaatatttttgatagccccagttctcttatcaagcataaagaagcatgttccctttctgcacctgttccctttgtaagttgattattgaatttttagggttgccgctaggaaacttctaggattgttatctcatgtagtttttaaaccttttgacaatcaattgcagaacatctgatcatttcctagacattcacactttgaatattttgttgattgccgcaggaaaaaacactgtctaatgcagaatctcaaaagaaaatttcaggggcaattgatgaaaagcgcacatgcagaggtcccaaagcagttgctatggactgtgaaatggttggtggtggaagcaatggaacacttgatctttgtgctagagtttgccttgttgatgaagatgagaatgtaatttttcacacatatgttcaaccccaacttcctgtcactaactacaggcatttccctgccctacattgtttttgattctgcaaattaatcattaggaagaacctgctgatcattgatatatcttcgtaaataatttcagatatgaagtaactgggttgactgaagaggatataaaaaatgccatgcctcttaaagaagtgaaggataaaattttggaaattttgaacaatggagagtctaccgggaggcttatgttggatgatggaaaggccagacttcttgtgggtcatggtctagagcatgatttggatagcttgaggatgaattaccctgatcacatgctgaggtaatataaatattttaaagatttttgacctgtctaattgatttaagttcactttcattgaaagatacatgataaaaaggatggattgttatttgaatcggacaaatgtcataatatggttcaaatcacccactcagctggttatctatgttcaattcaaagtaaaatgtgtttatagatcttctcaatctgcaatacaatcaaacttgattgtgatttgggatctggaaatgagaatcacacttcttttaaaacaatcttgtgatgtatctatgattacctcctttaccttatttcctgggcttaaacttcaagtcttctccagcaaaggccaccaaactcgagcagccacagttatggtaaaagttttgatgaaatttctactagtagcatttaaacttagcttcaaaagttttacttggagaaaaataactctgaactctgtttgtatctagttgcattggtttcataagtttcacttggtgaaaaaataaacctgaactctgtttgtatctggtttcatgtgttttggctctcacagttttgatttcaatattttaagacattttcgattatcatatattttgtctatgcagctgtattgttgcattgaagcatggccttttttttttgcgccttaaaataaccttttctttgtgtagggatactgcaaaatatcgtccattgatgaagacaaatctggttagccactcgctcaagtacctcaccagaacgtatctagggcaagttatttttgctttcagcacccatcctcatcactaacacccccaccccctctccctttaattttttaaattttctttgttatcctgaagtttcttgttcatgtggagctgctattgatatttcttttcttttacaagggaaaaaggaaagaggaaacttttaactgattctaacatttcactattccactgttaaactataaaggttcttggatgctgtttatgttagaaagtctcgtaacttttttaaaatttatagttgatgtgataggggaagcaagaattcctaaagaaggtcaaagaagaaatttagtaaaatgaaaggaaaacagtcttttgttcccatgcaatatctatatgcattttatgatttcaaataacacgtcggcagagtatggtatggtcggccacttggtgtctattcaatgtttggagttctgcgatcactaatgtaatctgtaagaaggatagaaaatcaccgtatttatttgcttcacaggtatgatatacagtctggggtgcatgatccatacgaagattgtgtatctgtcatgagactgtacaagagattccgcagacaagatcatcaggtagaagaaattggaaaccaaaatactaccggcagttttgattcttacaaatacaaggagcttgagaagatgagcccaaatgaactgtaccagatatcaaaatcagactatagatgctggtgcttggattagtatggagccttagcttgtgtacctctgctttcttcatctctatgtatatagcaatttttat

SEQ ID NO: 328 - protein, 342 aa, Citrus sinensis
MDTEAELPKRSTARHKCVACYKQFKRKDHLIEHMKISYHSVHQPKCAVCQKLSKSFESLREHLTGPLSKAHCSGIFSDRGCNLCMNIFDSPSSLIKHKEACSLSAPVPFKISGAIDEKRTCRGPKAVAMDCEMVGGGSNGTLDLCARVCLVDEDENVIFHTYVQPQLPVTNYRYEVTGLTEEDIKNAMPLKEVKDKILEILNNGESTGRLMLDDGKARLLVGHGLEHDLDSLRMNYPDHMLRDTAKYRPLMKTNLVSHSLKYLTRTYLGYDIQSGVHDPYEDCVSVMRLYKRFRRQDHQVEEIGNQNTTGSFDSYKYKELEKMSPNELYQISKSDYRCWCLD

SEQ ID NO: 329 - DNA, 1118 bp, Citrus sinensis
  source 1..1118: mol_type = other DNA
tgaaatttccgagtcatcaggtgttgaaatggacactgaagcggagcttccgaaaaggtcaacggcaaggcacaaatgtgttgcgtgctacaaacaatttaagcgaaaggatcatcttattgagcacatgaaaatctcataccattcagttcatcagccaaaatgtgctgtctgtcaaaaactctctaaatcttttgaatctctgcgggaacatcttactggtccattatcaaaagcacattgttcggggattttctctgacagagggtgcaatctttgtatgaatatttttgatagccccagttctcttatcaagcataaagaagcatgttccctttctgcacctgttccctttaaaatttcaggggcaattgatgaaaagcgcacatgcagaggtcccaaagcagttgctatggactgtgaaatggttggtggtggaagcaatggaacacttgatctttgtgctagagtttgccttgttgatgaagatgagaatgtaatttttcacacatatgttcaaccccaacttcctgtcactaactacagatatgaagtaactgggttgactgaagaggatataaaaaatgccatgcctcttaaagaagtgaaggataaaattttggaaattttgaacaatggagagtctaccgggaggcttatgttggatgatggaaaggccagacttcttgtgggtcatggtctagagcatgatttggatagcttgaggatgaattaccctgatcacatgctgagggatactgcaaaatatcgtccattgatgaagacaaatctggttagccactcgctcaagtacctcaccagaacgtatctagggtatgatatacagtctggggtgcatgatccatacgaagattgtgtatctgtcatgagactgtacaagagattccgcagacaagatcatcaggtagaagaaattggaaaccaaaatactaccggcagttttgattcttacaaatacaaggagcttgagaagatgagcccaaatgaactgtaccagatatcaaaatcagactatagatgctggtgcttggattagtatggagccttagcttgtgtacctctgctttcttcatctctatgtatatagcaatttttat

SEQ ID NO: 330 - DNA, 2957 bp, Citrus sinensis; identical to SEQ ID NO: 327
  source 1..2957: mol_type = genomic DNA

SEQ ID NO: 331 - protein, 354 aa, Citrus sinensis
MDYRVESSETLRNKCAACYRQFNKIEHLVEHMRTSYHSAHEPTCGICKKHCRSFESLREHLIGPLPKQECRNIFSTRGCKFCLAILDSPYALRVHQDRCQLSGVNAGLLGRFANLGIRDNTENGSTRGTQVVALACKMVGGGSDGSLDLCAKVCLIDEYENIIFQSYVKPLLPVTNYRYETTGIRPEYLRDAMPLRQVQKKIQDFLCNGEPMWKIRPRGGKARILVGHGLDHDLDSLQVEYPQVMIRDTAKYPPLMKTSKLSNSLKYLTQAYLGYDIQTGIQDPYEDCVATMKLYMRMRSQVHKTEAYPLASDPQNRNNFASWRQNELERMNPEQMLEASRSDYYCWCLDSRDM

SEQ ID NO: 332 - DNA, 1330 bp, Citrus sinensis
  source 1..1330: mol_type = other DNA
aaaatccaaaacaaagggataacaatattaattgctttatttttcttcaaggaatcacgtatcatcaatctctctctagatgcttacactcccactcagaagctattctcttcctcctatcgtggactgctataaataccttccattccctccacctttcccttcaagtcttgttcagcttccttaattaattacctttttgtttgagtatactagtctttcaaccatcatggactacagagttgagtcttcagaaactctgaggaacaagtgtgcggcatgctacagacaattcaacaaaatcgagcacttagtggagcacatgagaacctcatatcactcagctcatgaacccacatgtggaatctgtaagaaacattgcagatcctttgaatctctcagggaacatcttatagggccattgccaaaacaagaatgcaggaatatattcagcaccagaggatgcaaattctgcttagctatccttgacagcccttatgctctcagggttcaccaggacagatgccaactctctggtgtaaatgctggcctacttggtcgctttgctaatttgggcattcgtgacaatactgaaaatggtagcacaagaggcacccaagttgttgcacttgcttgcaaaatggttggtgggggcagtgacggctccctggatctctgtgcaaaggtctgcctcatcgacgaatacgaaaacatcatcttccagtcttatgtcaagccactacttccagtcacaaactataggtatgaaacaactggcattcgtcctgaatacttaagggatgcaatgcctctgaggcaagtgcaaaagaagattcaagacttcctctgcaatggggaaccaatgtggaagattcgacctagaggcggaaaagctaggattcttgtgggccatggtttggatcatgatcttgactctttgcaggtggaatatccacaagtaatgatcagggatactgcaaaataccctccattgatgaaaacaagcaagctcagcaactcactcaagtatctaacacaagcatatcttgggtatgacattcaaactggcattcaagacccttatgaggattgtgttgcaacaatgaagctctacatgagaatgcgatcccaagttcacaagacagaggcttacccactagcttctgacccacagaacaggaacaactttgcatcgtggcgccaaaatgagctcgagaggatgaacccagaacaaatgctggaagcctcaaggtctgattactattgttggtgtctggactccagggatatgtagtgcctgaaagtgaaaggaggctatatgaaaataata

SEQ ID NO: 333 - DNA, 2177 bp, Citrus sinensis
  source 1..2177: mol_type = genomic DNA
aaaatccaaaacaaagggataacaatattaattgctttatttttcttcaaggaatcacgtatcatcaatctctctctagatgcttacactcccactcagaagctattctcttcctcctatcgtggactgctataaataccttccattccctccacctttcccttcaagtcttgttcagcttccttaattaattacctttttgtttgagtatactagtctttcaaccatcatggactacagagttgagtcttcagaaactctgaggtacttgactctctctctctctctctctctctctctctctctctctctctctctctctctctctctctctctctctctctctctccccccatcagaatatcaatcttctatgcatcatgcatgatcctagttgtttaactaatcacaatatatacatgtttatgtgacttttaatgatcaggaacaagtgtgcggcatgctacagacaattcaacaaaatcgagcacttagtggagcacatgagaacctcatatcactcagctcatgaacccacatgtggaatctgtaagaaacattgcagatcctttgaatctctcagggaacatcttataggtaatcaaaccaattaatcaattaattctactcttgcacgtacacacacacatataaaatatatattatattctttaatacttccagaattcttttaatttccagttaatagtatgtatgtattggtttttgttcagggccattgccaaaacaagaatgcaggaatatattcagcaccagaggatgcaaattctgcttagctatccttgacagcccttatgctctcagggttcaccaggacagatgccaactctctggtgtaaatgctgtaataatcctaaattaacacaccaccttaattatgaattttctttctttctttctttctttcaatgcaaattagctcaattcttaatattattcatacatgcagggcctacttggtcgctttgctaatttgggcattcgtgacaatactgaaaatggtagcacaagaggcacccaagttgttgcacttgcttgcaaaatggttggtgggggcagtgacggctccctggatctctgtgcaaaggtctgcctcatcgacgaatacgaaaacatcatcttccagtcttatgtcaagccactacttccagtcacaaactataggtagctatattatatggaaaagatgatatgtgtaggtagagagcttcttctagtatatactaactatagtacaacatatatacttgtgtatatgcatataggtatgaaacaactggcattcgtcctgaatacttaagggatgcaatgcctctgaggcaagtgcaaaagaagattcaagacttcctctgcaatggggaaccaatgtggaagattcgacctagaggcggaaaagctaggattcttgtgggccatggtttggatcatgatcttgactctttgcaggtggaatatccacaagtaatgatcaggtaattttcattttcttctaccctaccaaacttaattgcaagataagcacaaaattacttgtgttactaatcatcccatatgttgtcttagttcaattccccattatttccccattttcctttgttcaatccagcatatataattttagatcaagctcaaaacttgagaaacatcatatatgtagaactttccattagtaatttcaaatgtatgtgactatatgtagggatactgcaaaataccctccattgatgaaaacaagcaagctcagcaactcactcaagtatctaacacaagcatatcttgggcaagtaccttattatatcaatttcgtctatctcaaattccaaatataaacctagctagctatgtgagtactaatggaactcctacatatttacaggtatgacattcaaactggcattcaagacccttatgaggattgtgttgcaacaatgaagctctacatgagaatgcgatcccaagttcacaagacagaggcttacccactagcttctgacccacagaacaggaacaactttgcatcgtggcgccaaaatgagctcgagaggatgaacccagaacaaatgctggaagcctcaaggtctgattactattgttggtgtctggactccagggatatgtagtgcctgaaagtgaaaggaggctatatgaaaataata

SEQ ID NO: 334 - protein, 358 aa, Citrus sinensis
MDFEPELPKTTNTRYKCAACYKQYKKKEHLVDHINVSFHSVHQPRCGVCKKHFKSFESQREHVTGPLAKENCKTVFSEQGCDLCLKIFDSPNSLSAHKYMCRLSAPVPLVTMMERCEEFKHDINSSNEYHVGDGTEAIALDCEMVAGGSDGSLDLCARVCLIDEDETILFHTYVQPQYPVVNYRYEVTGLTEEHLRDGMPLQKVQDKVLQILYNGKTKLLVGHSVENDLDCLRMNYPDYLLRDTANYHPLMKTNLVSHPLKYLTRTYLGYDIQSGFHDPYEDCVSAMRLYKRFCALDHQKEGNVASLAMLCAKDIPGSFDSWETDKLEKMTLDELYEMSRPNYKCWCLDSVQAMQPQH

SEQ ID NO: 335 - DNA, 2112 bp, Citrus sinensis
  source 1..2112: mol_type = other DNA
atttatattactttattagtgattttgattcactatctaatatctatgaagagaaattactcataacataatattgatataaagattcgtatatataagagtgatttcttgccaaatataatcaattatgataagaaaaaaaatgacggtcgcatagagaaattaatggtacaattacttgaaaaaccctaattctctgactctctgtgagagaagtcagaaaaaatatcccccatttgggctcacctccattttgtgcacatttctcgtactgctgttttcccgccaattttgaagcctcgtcgacggcgttgctgagagcagctctgggctccatggacttcgaaccagaacttccaaaaaccacaaacacaaggtacaaatgtgctgcatgctacaagcagtataagaaaaaggaacatctagtcgatcacattaatgtctcgttccattcagttcatcagcctagatgtggagtgtgtaaaaagcacttcaaatcttttgaatcacagagggagcatgtcaccggaccactggcaaaagaaaattgcaagacggttttctctgaacaaggttgtgatctatgtttgaagatttttgatagccctaattctctgagcgctcataaatatatgtgtcgcctatctgcacctgttcctctggtaacaatgatggagcgatgtgaagaatttaaacatgatataaactccagcaacgaatatcacgttggagatggtacggaagcaattgctctggattgtgaaatggttgctggtggaagtgatggatcactggacctgtgtgcaagggtgtgcctgattgatgaagacgagactatcctcttccacacttatgtgcagccccaatatcctgtcgttaattacagatatgaagttactgggttaacagaagagcatctcagagatggcatgccactccaaaaagtgcaagataaggttttgcaaattttgtataatggaaagaccaagcttcttgtggggcatagtgtagagaatgatttggattgcttgagaatgaactatcctgattacctgctgagggatactgcaaactaccatcctctgatgaagacaaatctggttagccacccgctcaagtacctcaccagaacatatctagggtatgatatccagtcaggttttcatgatccatatgaagattgtgtgtctgctatgagactctacaaaaggttctgtgcgctagatcatcagaaagaaggcaatgtggcttcacttgctatgctgtgtgcaaaagacatccctggaagttttgattcttgggaaaccgacaaacttgagaagatgacactcgatgagctttatgaaatgtcgagaccaaactacaaatgttggtgcctggattcagtgcaagcaatgcaacctcagcattagattctcacttgaagttaagtcattgcaattttcgttcacataccgcaggattgacagaaacatcacatgtaggaatatatgtaggaattacaagtctgaagctgttggagattctgagcaagggtaccatcgcacatgtagtaggaaaatctttttagggggtcatgccttaatgttatataagtttgttcatgcctcctttttcgtcatcggtctcggatggtgaaatgatgcaaattctctaaggccctgtttggtttgggagagaggatttgcatttgcatttagatttcaaatctatggatataatttcatgacatgattttgctgcttgggttttggggtagattttatttgtgtgattccctaaagagtacagagcttctgctctggtgtggcgtggtgcacgtgatgagatgcttaaaggttcagtgggtgagttagtaatttataaggtgggtatacgtatatatttctctagaagcagaactactttttgttttatacgtataaaccgaaaaaggagggttgggcctctgtcactatttacagcccaactagcccatcttcagctgtcagattagcaacgacttgtgggcttgtagcatcctaaggtaatagtaataccaaagcaaatgtaaattctattccgaaaaaagttaacccaaaaagaaaaaaaatcagaggactactgttcaac

SEQ ID NO: 336 - DNA, 3482 bp, Citrus sinensis
  source 1..3482: mol_type = genomic DNA
tttatattactttattagtgattttgattcactatctaatatctatgaagagaaattactcataacataatattgatataaagattcgtatatataagagtgatttcttgccaaatataatcaattatgataagaaaaaaaatgacggtcgcatagagaaattaatggtacaattacttgaaaaaccctaattctctgactctctgtgagagaagtcagaaaaaatatcccccatttgggctcacctccattttgtgcacatttctcgtactgctgttttcccgccaattttgaagcctcgtcgacggcgttgctgagagcagctctgggctccatggacttcgaaccagaacttccaaaaaccacaaacacaaggttccatctctctctctctctctctctctctctcacatcttctgcaatttgtgaggtttatggcttttatttccacatttccacaaggacttgcatgcttgctgagaaattgaatacagattttgtttgggtggcttatttatgaacttttctgataagctaattgaggtgcattgcagaatttgacatggtttatcacgcattgtttgattctagttttttcgaagtgtatttcttgatttggaaataaatttcctttgattttggaaacaaatccttccttggggatcatttcacttaattaatcccaattgtcctgctatagtaatgtatctaaacttgaatatttaagaacaattgcaaaactagttgacaaactgtgctattaggtatatacacaatgtgatatgtgatttttttgttgttgaatattttgaaaagattcttgacctgtgggctttgcaggtacaaatgtgctgcatgctacaagcagtataagaaaaaggaacatctagtcgatcacattaatgtctcgttccattcagttcatcagcctagatgtggagtgtgtaaaaagcacttcaaatcttttgaatcacagagggagcatgtcaccggtgagatgtaattccgagttgcattgtaattgatcagatcattgcatagtcgttttgattcatctataagattgcttgctgtttgatatcctttctctggttgctatgatttaggaccactggcaaaagaaaattgcaagacggttttctctgaacaaggttgtgatctatgtttgaagatttttgatagccctaattctctgagcgctcataaatatatgtgtcgcctatctgcacctgttcctctggtaagttgattagttgaacatcaagcgtcctgtatggaattgggaaacttgtcagcttccagtattctgaatcttttaccctttttacccattaaagatactcttagcagcaaccgcatataagatatgcacatacattacttatattttcagtcaaagtgttgcaggtaacaatgatggagcgatgtgaagaatttaaacatgatataaactccagcaacgaatatcacgttggagatggtacggaagcaattgctctggattgtgaaatggttgctggtggaagtgatggatcactggacctgtgtgcaagggtgtgcctgattgatgaagacgagactatcctcttccacacttatgtgcagccccaatatcctgtcgttaattacaggtactagtgtgttatgtttctcatctttgatttcttacaagaattttgcgaataggcctctgattattcccacgtgttgacaatgtttccattccagatatgaagttactgggttaacagaagagcatctcagagatggcatgccactccaaaaagtgcaagataaggttttgcaaattttgtataatggaaagaccaagcttcttgtggggcatagtgtagagaatgatttggattgcttgagaatgaactatcctgattacctgctgaggtataagagtttctgttttcttctgtaatcctcttcttgagatatgtgaatcacgagcacagtgtttctatagtttttctagatctgattgaactatcatgtcatgctatgttctggttctcatatgcacttgtattcttctcttcagtccctttctttattatataggccatagtgtttgggctgctttgtgtagatgtaagatagacggtgtcactgtttcttggacaattgcgtttatggctgtacttcctttcattcaggccagtcaagattatggccttagtcatgatgaaattttgcataaaggaccagcttatatggcatctatttaacatagattgagcaaagaagcctgttctctgttgcctcttagatgcttgatggttacttattttatatgcagggatactgcaaactaccatcctctgatgaagacaaatctggttagccacccgctcaagtacctcaccagaacatatctagggcaagttattcttcttctcagatttttacttttttagtctctatgttatttgcttgtagaagcaggctctagttttaattgctccattgaatatttagtgtcatgaggctttggttttacaggtatgatatccagtcaggttttcatgatccatatgaagattgtgtgtctgctatgagactctacaaaaggttctgtgcgctagatcatcagaaagaaggcaatgtggcttcacttgctatgctgtgtgcaaaagacatccctggaagttttgattcttgggaaaccgacaaacttgagaagatgacactcgatgagctttatgaaatgtcgagaccaaactacaaatgttggtgcctggattcagtgcaagcaatgcaacctcagcattagattctcacttgaagttaagtcattgcaattttcgttcacataccgcaggattgacagaaacatcacatgtaggaatatatgtaggaattacaagtctgaagctgttggagattctgagcaagggtaccatcgcacatgtagtaggaaaatctttttagggggtcatgccttaatgttatataagtttgttcatgcctcctttttcgtcatcggtctcggatggtgaaatgatgcaaattctctaaggccctgtttggtttgggagagaggatttgcatttgcatttagatttcaaatctatggatataatttcatgacatgattttgctgcttgggttttggggtagattttatttgtgtgattccctaaagagtacagagcttctgctctggtgtggcgtggtgcacgtgatgagatgcttaaaggttcagtgggtgagttagtaatttataaggtgggtatacgtatatatttctctagaagcagaactactttttgttttatacgtataaaccgaaaaaggagggttgggcctctgtcactatttacagcccaactagcccatcttcagctgtcagattagcaacgacttgtgggcttgtagcatcctaaggtaatagtaataccaaagcaaatgtaaattctattccgaaaaaagttaacccaaaaagaaaaaaaatcagaggactactgttcaac

SEQ ID NO: 337 - protein, 324 aa, Vitis vinifera
MRTSYHSVHEPTCGICKKHCRSFESLREHLIGPLPKVECARIFSVRGCNLCLDILGSPNALRAHRGTCQLSRGNTGALLSRMANLGIQDDLNSRTRGSKVVALGCKMVGGGTDGSLDLCARVCLIDEYENIIFHTYVKPQIPVTNYRYETTGTRPEFLRDAMPVKQVQRKIQDFLCNGEPIWKIRSRGGKARILVGHGLDHDLDCLQMEYPTLMIRDTAKYPPLMKTSKLSNSLKYLTQAYLGYDIQTGIQDPYEDCVATMRLYMRMRSQSHKIEDYPLASDPQNRNNFASGRQSELERMTPDEMLEISRSDYYCWCLDTKEGS

SEQ ID NO: 338 - DNA, 1065 bp, Vitis vinifera
  source 1..1065: mol_type = other DNA
gaagtttctctatgattaatcatcacggccaggaacaagtgtgcagcttgctacagacaattcaacaggttggagcacctggttgatcacatgaggacctcgtatcactcggttcatgagccaacctgtggaatttgtaagaaacactgcagatcttttgaatctctcagggagcatctcatagggccgttgccaaaagtggaatgcgcaagaatattcagtgtccgcggatgcaacctctgcttagatatccttggcagccctaatgcacttagggctcatcgagggacatgccaactttcacgcggaaacaccggagcgctgctttctcgcatggctaacctaggtattcaggatgacctgaatagcagaacaagaggctcaaaggtggttgcactgggctgcaaaatggtagggggtggaaccgatggctcgctggatctttgcgcaagggtttgcctcatcgatgaatatgaaaacatcatctttcatacttatgtcaagccccaaattccagtcacaaactacaggtatgaaaccacagggacaaggcccgaattcttgagggatgcaatgccagtgaagcaagtccaaagaaaaatccaagacttcctttgcaatggagagcccatatggaagattcgttctagaggtggaaaagctaggattctcgtgggtcatggtttggatcatgacctggactgtctacaaatggagtacccaacgctaatgatcagggacacagctaagtatcctccattgatgaaaacaagcaagctcagcaactcactgaagtatctgacacaagcatacctcgggtatgacatccaaactggcatacaagatccttatgaggattgtgttgcaacaatgaggctttacatgagaatgagatcccaaagtcataaaatagaggactacccgctcgcgtctgacccgcagaaccgaaacaactttgcatcagggaggcaaagtgagctagagaggatgaccccagatgaaatgttggaaatctccaggtctgattactattgttggtgcctggacacgaaggaaggctcctga

SEQ ID NO: 339 - DNA, 1714 bp, Vitis vinifera
  source 1..1714: mol_type = genomic DNA
gaagtttctctatgattaatcatcacggccaggaacaagtgtgcagcttgctacagacaattcaacaggttggagcacctggttgatcacatgaggacctcgtatcactcggttcatgagccaacctgtggaatttgtaagaaacactgcagatcttttgaatctctcagggagcatctcataggtaaaatccaagacaactacatgaaacccgaaccatattgcccttatgaagatatatcattcaaaggaagtacttcttgtcttgggcagggccgttgccaaaagtggaatgcgcaagaatattcagtgtccgcggatgcaacctctgcttagatatccttggcagccctaatgcacttagggctcatcgagggacatgccaactttcacgcggaaacaccgtataaatcttcagcttgcatgacaatacaatttgaagttctaatgactttgtctagtttcaagcatgtcacatgttactgcccttttcttttccagggagcgctgctttctcgcatggctaacctaggtattcaggatgacctgaatagcagaacaagaggctcaaaggtggttgcactgggctgcaaaatggtagggggtggaaccgatggctcgctggatctttgcgcaagggtttgcctcatcgatgaatatgaaaacatcatctttcatacttatgtcaagccccaaattccagtcacaaactacaggtttgatgagtctctttaaagctaactgtatttccaccctggctgaatttcaattctaaatataaattcttgaaaacattgtaggtatgaaaccacagggacaaggcccgaattcttgagggatgcaatgccagtgaagcaagtccaaagaaaaatccaagacttcctttgcaatggagagcccatatggaagattcgttctagaggtggaaaagctaggattctcgtgggtcatggtttggatcatgacctggactgtctacaaatggagtacccaacgctaatgatcaggtaaaaagcccttcaaattaagaaaatcaaaattgcaccatagctttgaaactataacagtgggtctcaaactagaatcaaccagcatcattcataattccatcatggctattatactcatgtaacagaaaatcaaggtattttctgaacaggtgattggtgtccagttctctattctcaacaaaaactcttaagggtggagcctcaaaaaaataaataaataaataaaaacaattgcaaaatcagatgtaatataatactgaattaatctgaaatgcatattggatcagggacacagctaagtatcctccattgatgaaaacaagcaagctcagcaactcactgaagtatctgacacaagcatacctcgggtaagtacatcacatgcatttcaatttcgagttcactgccaaaatttaaatatatatttcaggaaaggaatgaaacttctggtttccaggtatgacatccaaactggcatacaagatccttatgaggattgtgttgcaacaatgaggctttacatgagaatgagatcccaaagtcataaaatagaggactacccgctcgcgtctgacccgcagaaccgaaacaactttgcatcagggaggcaaagtgagctagagaggatgaccccagatgaaatgttggaaatctccaggtctgattactattgttggtgcctggacacgaaggaaggctcctga

SEQ ID NO: 340 - protein, 341 aa, Vitis vinifera
MGSEAVPSESRTTRYKCLACFRQYKKKEHLVEHMRVSYHSVHQPKCGVCQKQFKSFQSLREHLTGNLPKKNCLKIFSEQGCNYCLKIFKNADSLSEHKEMCQLPVPVTIEKIRMPSTESQIDFSDSINRDHTSRGLEAIAIDCEKVGGGSDGSLDLCARVCLIDEDENIIFHTYVQPQIPVTNYRYELTGITEAHLRDAMPLKEVREKVMEVLRNGESIGRLRLDGGKGRLLVGHDLRHDLDCLRMHYPDHLLRDTAKYLPLMKTNLVSFSLKSLTQKYLGYDIQSGMHDPYEDCVSVMRLYKRMQSQDHSDEGIGTAIHYRLRVMIFGHNRTDTGGSMRT

SEQ ID NO: 341 - DNA, 1423 bp, Vitis vinifera
  source 1..1423: mol_type = other DNA
ctgattttgtttttttttgggttcgggttgttagtgaggtttccagagaatccatgggctcggaggcagttccttcggaatctagaactacaaggtacaaatgtttggcctgcttcaggcaatataagaagaaggagcatctagttgagcacatgagggtatcatatcattctgtgcatcagccaaaatgtggggtctgccagaagcagttcaaatctttccagtcactaagggaacaccttactggtaatttgcccaagaaaaattgtttgaagatattctctgagcaaggttgcaactactgtttgaaaatcttcaagaatgctgattctctcagtgagcataaagaaatgtgtcaattacctgtgcctgttacaatagaaaaaatcaggatgccatctacagaatctcaaattgatttttcagattctattaatagagaccacactagcagaggtcttgaagcaattgccattgactgtgaaaaggttggtggcggaagtgatggatcgcttgacctttgtgctagggtatgcctcatagatgaagatgagaatataatttttcacacttatgtgcagccacaaattcctgtcaccaattacagatatgagttaactgggattactgaagcacatctgagagatgccatgccactaaaggaagtgcgggaaaaagttatggaagttttacgaaatggagaatccattgggcgactgcgtttggatggtgggaagggcagacttcttgtgggtcatgacctacgccatgacctggattgcttgagaatgcactatcctgatcacttgctgagggatactgcaaaatacctccccttgatgaaaacaaatttagtcagcttctccctgaagtcgctcactcaaaaatatcttgggtacgatatccagtcagggatgcatgatccatatgaagattgtgtatctgtaatgaggctgtacaagagaatgcaatctcaagatcactcagacgaaggaattggaacagccattcattacaggctgagagtaatgatctttgggcacaatagaactgatacagggggttcgatgagaacatgacaggaaaagaagcgaatatctccggtgagtctacaacattgtagccatgaaatgaatgtgctacaatgttgaagatatttcgtcgaatatgagatcattatgagaacatttcctgatatagcaaactcaatattgatagggcttcttcaatacccaaccctgttttcctatgcaaacattaaacagatcttgtgcttgtgtgtgtgtgtgtgtgggtttgattgttttgttggagttgcctttttattattttttattttttaaatatttttattttgcaaatactttcccatgtagtgaagaatgaggaagagatcttatataatttcgcatgtaaggggtta

SEQ ID NO: 342 - protein, 353 aa, Vitis vinifera
MDSRNESSETLRNKCAACFRQFNRMEHLVEHMRISYHSVHEPMCGICKKHCRSFESLREHLIGPLPKQECKNIFSIRGCKFCLNIFDSYSSRMIHQERCQLSNLSTGLIARMSSLGLRDHLMIDNGYAVGNQVVALACKMVGGGSDGSLDLCGRVCLIDENENIIFHTYVKPPIPVTNYRYESTGIRPEYLRDAMPLKMVQSKIQNFLCNGEPMWKIRPRGGKARILVGHGLDHDLDRLQLEYPAVMIRDTAKYPPLMKTSKLSNSLKYLTQAYLGYDIQTGIQDPYEDCVATMRLYMRMRYQRHAVEAYPFASDPQNRNNFASWRQAELERVSPEELLAISRSDYYCWCLDS

SEQ ID NO: 343 - DNA, 1373 bp, Manihot esculenta
  source 1..1373: mol_type = other DNA
cttgcctacctaaattttcaagatttgcactactgcttccacaactctcatggactctagaaatgagtcatctgagactttaaggaacaagtgtgcagcttgcttcagacaattcaacagaatggagcacttagtggagcacatgagaatctcctatcattctgttcatgaacccatgtgtggaatctgtaagaaacactgcagatcctttgaatccttaagggaacatcttatagggccactgcctaaacaagaatgcaaaaatatcttcagtatccgaggatgtaaattttgcttgaacatctttgatagctacagttctcgcatgattcatcaagaaagatgccagctatcaaatcttagtactggactaattgctcgcatgtctagtttaggactgcgagaccacctcatgatcgacaatggctacgcagtaggtaatcaagtagttgctctggcatgcaaaatggtaggaggaggcagtgatggctctctagacctttgtggaagggtttgcctcattgatgagaatgaaaatattatcttccacacttatgtcaaaccaccaattccagtgaccaattacaggtatgaaagcacagggattcggcccgagtacctgagggatgcaatgccattgaagatggttcaatctaagattcagaacttcctttgcaatggtgaaccaatgtggaaaattcgacccaggggaggaaaagcaaggattcttgttggtcatggtttggaccatgatcttgaccgtcttcaactagaatatccagctgtaatgatcagggatacagcaaaatatcctccattgatgaaaacaagcaagctcagcaactcactcaaatacctaactcaggcctatcttggatatgacattcaaactggcatacaagatccatatgaggattgtgttgcaacaatgagactttacatgagaatgagatatcagcgacatgcagtagaagcttacccatttgcttcagacccacaaaatcgaaacaattttgcttcatggaggcaagctgagcttgaaagggtgagcccagaagaattgcttgcaatatcaaggtctgattactattgttggtgcttggattcttagaggaaatggatgttaattcctacaggaaccaacttaattcatcaacacacatgatttatgtacgtgtgttgaccattggaaacaaggacttgagaactatccaatacttaagatagctaggaagaataattaataagttggagatatatgatgtatgtgtttccattagctacttagtacttacagtgtagtagtgtcatttaaaactaaatttatataagctgcttaaaaataaatggaatccaacttatttattggctga

SEQ ID NO: 344 - DNA, 2618 bp, Manihot esculenta
  source 1..2618: mol_type = other DNA
cttgcctacctaaattttcaagatttgcactactgcttccacaactctcatggactctagaaatgagtcatctgagactttaaggtgctctttccctctccttctctctctctctcatttcttggcacacagttttatctcacatcaattagatatgtaggtaatgtgaacttaaaagtaaatttttctctaaattagctagattttggagataaattaggccggttcgatttttttatcatactataaaagttttcaaatttcatactctaacatattaaaatttttcagtatcgattggagattctgatactaagttaaatttaattaaggaaaaaagtatttaaaactttataaaaaagacattatcttaccataaatcgatgtgggattaaacaaagatgagttatattataagaatagctctttctatttgaaatattatactgcaaccggtgaaaaatttcaccacggatgagggttctcgacatgcatgcatgatcccaatgatgctatatgtatagtgcatgactataatagtaccacatgcaggaacaagtgtgcagcttgcttcagacaattcaacagaatggagcacttagtggagcacatgagaatctcctatcattctgttcatgaacccatgtgtggaatctgtaagaaacactgcagatcctttgaatccttaagggaacatcttataggtaaacttcaatcataaattctcctcactcgtataatctccagttttctctcattacaagggtttttaatatcaagggtctaatttgttaatttctacagggccactgcctaaacaagaatgcaaaaatatcttcagtatccgaggatgtaaattttgcttgaacatctttgatagctacagttctcgcatgattcatcaagaaagatgccagctatcaaatcttagtactgtatgaatcatcttcacccttgtgaattattgttattacacttccatattaattaatgatgaaaccccttttgctaatttccctaattggttttgttgtttttttgtagggactaattgctcgcatgtctagtttaggactgcgagaccacctcatgatcgacaatggctacgcagtaggtaatcaagtagttgctctggcatgcaaaatggtaggaggaggcagtgatggctctctagacctttgtggaagggtttgcctcattgatgagaatgaaaatattatcttccacacttatgtcaaaccaccaattccagtgaccaattacaggtattgattttaacttagtcatgttagagtcatctttgcacttataaactttcgaatttaagtctcaatcggagctaaataaaaaaaaaaaaaaaaaaaagaaaattatcaagagtctttgatcgattcttgcaaaactttgcaggtatgaaagcacagggattcggcccgagtacctgagggatgcaatgccattgaagatggttcaatctaagattcagaacttcctttgcaatggtgaaccaatgtggaaaattcgacccaggggaggaaaagcaaggattcttgttggtcatggtttggaccatgatcttgaccgtcttcaactagaatatccagctgtaatgatcaggtaataaaggtcctcccgacagctaaaagtttcaccctgtttccttatagctctctccctagcaattataaagtaaagcggttatatcaagtaggattaactatacagtacaaattaaagatagacaactatataaatataacctagtataaatgagtaaaccctaataattttttttcaaaaaaaaaaactatttttatataattatttatttgttattgacttattatactatatagacaattttatatgatataatggcttttacggtataattttttctcactcttcttttttttgaattgttttgagaaacccgttaatataaaagcaccttggatggattccattacagggatacagcaaaatatcctccattgatgaaaacaagcaagctcagcaactcactcaaatacctaactcaggcctatcttgggtatgtattatctttttttttttttcccttctacatgtttagtgtgcctaaaagtttttaacgcacagatatgacattcaaactggcatacaagatccatatgaggattgtgttgcaacaatgagactttacatgagaatgagatatcagcgacatgcagtagaagcttacccatttgcttcagacccacaaaatcgaaacaattttgcttcatggaggcaagctgagcttgaaagggtgagcccagaagaattgcttgcaatatcaaggtctgattactattgttggtgcttggattcttagaggaaatggatgttaattcctacaggaaccaacttaattcatcaacacacatgatttatgtacgtgtgttgaccattggaaacaaggacttgagaactatccaatacttaagatagctaggaagaataattaataagttggagatatatgatgtatgtgtttccattagctacttagtacttacagtgtagtagtgtcatttaaaactaaatttatataagctgcttaaaaataaatggaatccaacttatttattggctga

SEQ ID NO: 345 - protein, 350 aa, Manihot esculenta
MASRNESSDTLRNKCAACFRQFNKMEHLVEHMRISYHSVHEPICGICKKHCRSFESLREHLIGPLPKQECKIIFDVVGCKFCLTILDSYNSRMIHQGRCQLSNGLIARMPNLGLRDNLTIDSGYTRGPQVVALACKMVGGGNDGSVDLCGRICLIDENENIIFHTYVKPPVPVANFRYESSGIRPEYLRDAMPLRLVQSKVQNFLCNGEPLWKVRPRGGKARILVGHCLDHDLDLLQLEYPAMMIRDTAKYPPLMKTSKLSNSLKYLTQAYLGYDIQTGIQDPYEDCVAIMRLYMRMRSQKHAPEDYPLASDPQNRNNFASWRQAELERMSPEEMLAISRSDYYCWCLDS

SEQ ID NO: 346 - DNA, 1289 bp, Manihot esculenta
  source 1..1289: mol_type = other DNA
ctcaggatcaacactgctacttccacaactctcatggcctctagaaatgagtcatctgatactctaaggaacaagtgtgcagcttgcttcagacaattcaacaaaatggaacacctagtggagcacatgagaatctcctatcactcagttcatgaacccatttgtggaatctgtaagaaacactgcagatcctttgaatccttgagggaacatcttataggtccactgcctaagcaagaatgcaaaattattttcgatgtcgtaggatgcaaattttgcttgaccatccttgatagctacaattctcgcatgattcatcaaggaagatgccaactttcaaatggactgattgctcgcatgcctaacttaggcctgcgagacaacttgacaattgacagtggctacacaagaggtcctcaagtagttgctcttgcctgcaaaatggtaggaggcggcaatgatggctctgtagacctttgtggaaggatttgccttattgatgagaacgaaaatataatcttccacacttatgtaaaaccaccagttcctgttgccaatttcaggtatgaaagtagtggcattcggcctgagtacttaagggatgcaatgccactgaggttggttcaatccaaggttcagaacttcctttgcaatggagaacccttgtggaaagttcgacccagaggaggaaaagcaaggattcttgtgggtcattgtttggaccatgaccttgaccttttacaactagaatatccagctatgatgatcagggatacagcaaaatatcctccattgatgaaaacaagcaagctcagcaactcactcaagtacctaacacaggcctatcttgggtatgatattcaaactggcattcaagacccttatgaggattgtgttgcaataatgaggctttacatgagaatgagatcccaaaagcatgcaccagaagattacccacttgcttcagatccacaaaatcgaaacaattttgcttcatggaggcaagctgagcttgagaggatgagcccagaagaaatgcttgcaatatcaaggtctgattactattgttggtgcttggactcctagaggaaatggatgttaatcctaaacaatggagctaaaatccttcaacacatatatgatatatatcagtccaatggtggaaagaattaccataattatccaatatttattacagctaggaaaataattaataaattggaaatatattatatgcatatttccatgagctacttaattaattattctgtagtaatccatgcagctga

SEQ ID NO: 347 - DNA, 2549 bp, Manihot esculenta
  source 1..2549: mol_type = other DNA
ctcaggatcaacactgctacttccacaactctcatggcctctagaaatgagtcatctgatactctaaggttctctctctctctctctttctctctcttgtgtagcacacatatggatgtgtttgtctagatccctaccttaaattatttacttcaagatagattagcatccaatgtttaggatcaggatggtttctttcatttgtgtggatcttagaatgtattgtcatactatgtttttcttggattctaataaaacttttcttataaaaaaattataacgtattgtttcgtatccatttttcatgatcggtatgaacataaatatattgaatgccaaaccataaaatttatatgcttttccttgtactatgtttgtgcacattactagaaaattttatattaactaattgttgtatatactatgattaacggctataatatataatcttcgaatatacaaaaattgtattataaaatttcgttagactccgattaaataggctttccgaactaaatgaatataggattttttgatagcatgatattagttattgaggtataatatatataaagtgccaaaactaataatatttgcatttgtatttgcaggaacaagtgtgcagcttgcttcagacaattcaacaaaatggaacacctagtggagcacatgagaatctcctatcactcagttcatgaacccatttgtggaatctgtaagaaacactgcagatcctttgaatccttgagggaacatcttataggtaataatttttcagtaagaacttatcctcactcagataatctccagctagtttcctattattattaagggtttaatttgcatgctttgcttctacaggtccactgcctaagcaagaatgcaaaattattttcgatgtcgtaggatgcaaattttgcttgaccatccttgatagctacaattctcgcatgattcatcaaggaagatgccaactttcaaatgttaatgctgtattgatcgtcaacttcagtaccctttattaattaattagcaatttccatagtctagctaagtatttgctgggttgttgcttgctttagggactgattgctcgcatgcctaacttaggcctgcgagacaacttgacaattgacagtggctacacaagaggtcctcaagtagttgctcttgcctgcaaaatggtaggaggcggcaatgatggctctgtagacctttgtggaaggatttgccttattgatgagaacgaaaatataatcttccacacttatgtaaaaccaccagttcctgttgccaatttcaggtaacaatattgcgtactatgttttttcgaaaatcaaaatttgaactgctatgttactattatggaattttctgattcggagagattgcgaatgattgttgtgaaggttcatatattgagcttagggttgcttctatcaaaatttttttaatgtgggacattcagcaaccaggcaatgtaaatgttagctgtgtttattgattcttgcaaatactttgcaggtatgaaagtagtggcattcggcctgagtacttaagggatgcaatgccactgaggttggttcaatccaaggttcagaacttcctttgcaatggagaacccttgtggaaagttcgacccagaggaggaaaagcaaggattcttgtgggtcattgtttggaccatgaccttgaccttttacaactagaatatccagctatgatgatcaggtaaataaagcttctactgctagaagctagccaagttgcaacttttttaaatgaaaactcatttcttttcaattattctgagtaaccttgtgagaaaaagtatcttgaatggattccattacagggatacagcaaaatatcctccattgatgaaaacaagcaagctcagcaactcactcaagtacctaacacaggcctatcttgggtatgtactcttgtttcctcttcgtctaaatttctcttatataacatatactttaatatcatctgcctatatatttaaggaaaaattatcatttggtccatgaaatatagaaaaacccattaattagtcccttaatttaaaaaaaatacattataatgtcattataattttataggtatgatattcaaactggcattcaagacccttatgaggattgtgttgcaataatgaggctttacatgagaatgagatcccaaaagcatgcaccagaagattacccacttgcttcagatccacaaaatcgaaacaattttgcttcatggaggcaagctgagcttgagaggatgagcccagaagaaatgcttgcaatatcaaggtctgattactattgttggtgcttggactcctagaggaaatggatgttaatcctaaacaatggagctaaaatccttcaacacatatatgatatatatcagtccaatggtggaaagaattaccataattatccaatatttattacagctaggaaaataattaataaattggaaatatattatatgcatatttccatgagctacttaattaattattctgtagtaatccatgcagctga

SEQ ID NO: 348 - protein, 364 aa, Manihot esculenta
MDSDSYPPTKALTTRYKCYACYKQYKKKEHLVEHMKISYHSAHQPRCAVCQKHCKSFESLREHLTGPLAKTNCLGIFSDRGCDLCLEVFDSPSSLNKHREMCCLSAPASLATEIPTCTESQIYVSGSIDESYACKGGEAVAIDCEMVGGGSDGSLDLCARVCLLDEDENIIFHSYVQPQIPVTNYRYEVTGLTEKHLRDAMPLKEVQNKILEILYNGESIGKLRLSGGNARLLVGHSLDHDLDCLRMFYPDHLLRDTAKYRPLMKTNLVSHSLKYLVQTYLGYNIQTGVHDPYEDCVSVMRLYKRMRAQNHHVEGSGIQSICGGFDFWKPKELEKMTPEKLYEISRSNYRCWCLDLKGQQPGLI

SEQ ID NO: 349 - DNA, 1534 bp, Manihot esculenta
  source 1..1534: mol_type = other DNA
ccagtctcctttccaagtcccggctgtgttcagtccctgtgaatccttcggcttaacttttcctattgatcaagaaaaaaaataccccactgattttagcggatttcagctacatggattccgattcttacccaccaacaaaagccctaaccacaaggtacaaatgttatgcatgctacaagcaatataagaaaaaggaacatcttgttgaacacatgaagatctcgtaccactcagctcatcagcccagatgtgcagtttgtcagaaacactgcaaatcttttgaatctctgagagaacatcttacaggtccgctggcaaaaacaaattgtttgggtattttctcggaccgaggttgtgatctttgcttggaagtttttgatagcccttcttctcttaacaagcacagggaaatgtgttgcctttctgcacctgcttcccttgcaactgagataccaacttgcacagaatcacagatttatgtttcaggatcaattgatgaatcttatgcttgcaaaggtggtgaagctgttgctattgactgtgaaatggttggtggtggaagtgatggatcacttgatctttgtgctagggtgtgccttcttgatgaagatgaaaacataattttccactcgtacgttcaacctcaaattcctgtaaccaactacagatatgaagtaactgggttaactgaaaaacatctaagagatgccatgccgcttaaggaagtgcaaaataaaatattagaaattttgtacaatggggaatctattggaaaactaaggttgagtggtggaaatgcaaggcttcttgtcggtcattcactggaccatgatttggattgtttgagaatgttctatcctgatcatctgttgagggatacagcaaaataccgtcctttgatgaagactaatctggttagccactcactgaagtaccttgtgcaaacctatctaggatataatattcagacaggggtacatgatccttatgaagactgtgtgtcagtgatgagactttacaagagaatgcgtgcccaaaatcatcatgttgaaggttcagggatacaaagtatatgtggtggttttgacttctggaaacccaaggaacttgagaagatgactccagagaagctatatgagatctcaagatcaaactacagatgttggtgcctggacttaaaaggccagcaacccggcttaatatagatcttctgaacaagtagaaaaattgagaggttcaacagctgtaaatgggatcctgcagttctttctcgccttttggtttttgaggagtctgccaagctatggtggctatttttggctgctcacaggttataaacatgacgtctaagatttgaaatagtttcttaaaattaattattgatcagtatgggtgtctgggtggagaagaaaatcttggtcccaagagtttctgtacagtttcatagatataatagtatatatctttgatattataacttattttaatgaaattttatggtcatgtaatgttttctttcaccgctgatttt

SEQ ID NO: 350 - DNA, 4700 bp, Manihot esculenta
  source 1..4700: mol_type = other DNA
ccagtctcctttccaagtcccggctgtgttcagtccctgtgaatccttcggcttaacttttcctattgatcaagaaaaaaaataccccactgattttagcggatttcagctacatggattccgattcttacccaccaacaaaagccctaaccacaaggttcttccctctgtctctctgtgtgttgctgcttggtttgaagggaaaatgtggaaaaggaatgaattttacttctcgttttcgctgtatttgcgcgtgtactgtatacaattccctggaataatgatcattttaggcctcctctatattctactcaagtgtagttgtttctactaatccaagtagactaaccttggcgagtaccataatagtaacttacatttagagtgtaaaatcaattgcagacatgcctgtattagagtaatatcacgatgtgatagaaaattgctgaacatatcattatgcattgtcaataatacatatccatccatcaggaaatttccagaattttccatatggaatttcagacgaatttctttgcagaaagacatataccttccgtttagcatgattcattttacaataaaagatatcaaatgaattcttgcaagatttctacttctcttaaaatgatttttttttaaagataaaaagaattgtattctttcattccatataagataattgttagaaaagaaatcaattgaattgaattcttataaaattttttattccaaacagaggataattttttaaaaaaaacagagggataatgcttagttgcatattttgttattacttgttatattaatcaataaactatatgactgaccaacttcagtttccagtatataaaattggcattattgttttggattctagagtgatgagtagatatcttggtctgatttaaataggataattgaaaataatgtatttgtttgcaggtacaaatgttatgcatgctacaagcaatataagaaaaaggaacatcttgttgaacacatgaagatctcgtaccactcagctcatcagcccagatgtgcagtttgtcagaaacactgcaaatcttttgaatctctgagagaacatcttacaggtgtggttctattccatgtttatcctgctgtatctgttaataagttgattattttggcttatactcttatcgtttaggtccgctggcaaaaacaaattgtttgggtattttctcggaccgaggttgtgatctttgcttggaagtttttgatagcccttcttctcttaacaagcacagggaaatgtgttgcctttctgcacctgcttcccttgtaagtggattgttaagatttgaaggattccttgaagaaattaagaaaccaatctttttatattgcttctagtttatttttctcttttaaggggtcaattagtgaaggttatcatcatcacttgcttttaggtgcataaatttggaactttctgttgtttattgtaggcaactgagataccaacttgcacagaatcacagatttatgtttcaggatcaattgatgaatcttatgcttgcaaaggtggtgaagctgttgctattgactgtgaaatggttggtggtggaagtgatggatcacttgatctttgtgctagggtgtgccttcttgatgaagatgaaaacataattttccactcgtacgttcaacctcaaattcctgtaaccaactacaggtacttttaaaatcctatgttatcatttaattcttcaaaatacagaaagcattattaggtatattgtcattcacatctattcaaatgtttcagatatgaagtaactgggttaactgaaaaacatctaagagatgccatgccgcttaaggaagtgcaaaataaaatattagaaattttgtacaatggggaatctattggaaaactaaggttgagtggtggaaatgcaaggcttcttgtcggtcattcactggaccatgatttggattgtttgagaatgttctatcctgatcatctgttgaggtacatttatattagatagactgacatgatataagattagctcatttaatgttccatgatgatgaagttattttggatgaatccttatggtacttgatacatattatacatatctccatttggcaaaaatcaatttgcccatttctggggggaaggaatcctaagatattaccatcagtgaccttgtctgggacttggttaatatcatagacattttactggtatgtaaccaagtcatgtttcctcacattaattggatacagtatcttttctttgtgtatcaagcatcactgggattctggaattgatgattttgcaatgactgttttctagtgtaataactgtccaatatcctttcagaaatatgtggacattcctaattgcttatgtgattatattatcataagggcagttctttgaggcattaaacaccttcccatcagcggctggcaatctttagaatcatcagaatagttcactattttttggcaagtcttatatgagcaatcataatgagtttgtcttggtacttgcaaactaaaaattgattgttgttaacgtaaatactgaggagctctattgagtaaataaatagaggaaataaagtaaacaggtttagtaaagttctattgatagattttcttccttcagatatttatatctggaacaaataatttgtactattcaatataattctttttttggtgtgctctccccagttttacatactttagcagtgttacactttccgccagttgaccaaaagagtcttgatctttgtgtggtttttcagttttggcccaaccagttaaactttaattggttttattgtgtctaatatagtgaggttatttgaaatgtgtatttaggaagctcggctgctaaaatttacttattttctgtatggtattaaattttgatcatttagggatacagcaaaataccgtcctttgatgaagactaatctggttagccactcactgaagtaccttgtgcaaacctatctagggtaagtcactcatcctttctggtttattgctcatgctgatgttgaattactctacaatgtttatgcatttattttttgctcttcttctttttcccgattccttttattattacctatttgaattcctctgcgctatctatattgctgtttctttttttggaagtcaaatgcttgaaatgacatactttaactctttgttatacactctgattttacaatgcagattttatgccttttaggattatccattccagtggaatgttttgcattatgatgatgcttaaaagaatgaagtaacatgttcatatacattacaatactaaatgtttgtggtcccagaatttgtttaagagaccaacaagttttctaaacttgtagtggaaaagactggaacaatatccaaacaggaattttggggaagtcggttgaagtagagtttaagatttggcaaaaaagacttttatgtcttcttttttttttttattgtggaagtggtgggtgtgttgggtaagtctcttcctctttgatgctgttcttctttgacatgagaggatagattacctaaaatcacatatttcttctgcttgcagctaacagatgtaactttagctgaatttgacaaacatcatattcttccatttacttaaggccactctgacaagtgacaaaacatcatacttactacaagacaacatgcttacttttaccttttttcactgttacacgggccttgactatgtaatctaccagaaaaaaaagccatccgcttgtcataacaaaatttctgcttcacagatataatattcagacaggggtacatgatccttatgaagactgtgtgtcagtgatgagactttacaagagaatgcgtgcccaaaatcatcatgttgaaggttcagggatacaaagtatatgtggtggttttgacttctggaaacccaaggaacttgagaagatgactccagagaagctatatgagatctcaagatcaaactacagatgttggtgcctggacttaaaaggccagcaacccggcttaatatagatcttctgaacaagtagaaaaattgagaggtaatgccattattttcctgctttgctacatgcattatggataaggtcacataccccaatcattattaaaatttcagaacacttgttacacccttgctgaacattacatcctcgtgttcagaccataaactttcttcattgacatttgaagaggtttgtataaatcaatcattgactggccagtctgcccctcacagagcctcagttctttccatgttaatgatgtatattgttgtctttatattttggatttctttattagatctcatttttacattctcagcgcaatagtgattgtatattatatacattttgtaggttcaacagctgtaaatgggatcctgcagttctttctcgccttttggtttttgaggagtctgccaagctatggtggctatttttggctgctcacaggttataaacatgacgtctaagatttgaaatagtttcttaaaattaattattgatcagtatgggtgtctgggtggagaagaaaatcttggtcccaagagtttctgtacagtttcatagatataatagtatatatctttgatattataacttattttaatgaaattttatggtcatgtaatgttttctttcaccgctgatttt

SEQ ID NO: 351 - protein, 351 aa, Manihot esculenta
MESSESMRNKCAACFRQFIRMEHLVDHMRTTYHSVHEPTCGVCKKHCRSFESLREHLIGPLPKQECKNLFNIRGCKFCLAILDSPYALRIHQDRCQLSGVNYGIAARLANLGLRDSLTIDNGFSRGPQVVALACKMVGAGSDGSLDLCARVCIIDENENMIYHTYVKPPIPVTNYRYETTGIRPEYLRDATPLRQVQRRIQDFLFNGEPMWKIRSPKGGKARILVGHGLDHDLDRLQVEYPAIMIRDTAKYPPLMKTSKLSNSLKYLTQAYLGYDIQTGIQDPYEDCVATMRLYMRMRNQAHRRENYPLASDPQNRNNFASWRQSELERMSPEEMLATSRSDYYCWCLDSE

SEQ ID NO: 352 - DNA, 1672 bp, Theobroma cacao
  source 1..1672: mol_type = other DNA
aaaatcatgacaccagattaaagaagaatacaaaacccgacactcaacattcctagttacgcaaagaccagcttagcactgtcctcaaattaacatatggacaagtatctcaaagcttgattcactagagtgtgatcccacacttagcaagacgcaacgacagtggagtaacagcagcatccagtcccacagatatcagctgacgacaagagcttccaaactcaaacagaaacccaggccatccaaccctagcatcaagaaagtaccttggtatcatttcaaagctcagcaccaacaggtatcacaactcagcattcgaatctaacttgtgtggtaattttttcaaagaaggaattttattgtaatgacttttttctagagtaagtttgttgtgaaagtgaggggatgaactggagatgagatggaatggaatggaatggagctttagtgaagtaagagggagagaggatctgatcccccggttaggtccttctaaagtaacacacgctaaattttcgacgctcatcataacaagatggagtcttcagaaagcatgcggaacaaatgcgcggcatgcttcagacagttcatcagaatggagcacctggtcgaccacatgagaactacatatcattcagttcatgaacctacttgcggagtgtgtaagaaacactgcaggtcgtttgaatcgctaagggaacatcttataggtccattgccgaaacaagagtgcaagaatttgttcaacatccgaggatgcaaattctgcttagccattctggatagcccatatgctcttaggatccatcaagacagatgccagctctcgggagtaaattatggaatagcggctcgtctggctaacttaggtcttcgtgatagcttgacaatcgacaatggtttttcaagaggcccgcaagtagttgcactagcttgcaaaatggttggtgctggcagtgacggctcattagatctttgtgcaagggtttgcatcattgatgaaaatgagaatatgatctaccatacttatgtcaaaccaccaattccagttacaaactacaggtatgaaaccacaggcattcgaccagaatatttgagagatgcaacgccattgagacaagtgcaaagaaggattcaagacttccttttcaatggagaaccaatgtggaaaattcgatcacctaaaggtggaaaagccaggattctcgtgggtcatggtcttgatcatgaccttgaccgtctccaagtagaatacccagcaatcatgataagggatactgcaaaatatcctccgttaatgaaaacaagcaaacttagcaactcactcaagtacttaacccaagcatacctggggtatgacatccaaaccggcattcaagacccttatgaggactgcgttgccacaatgaggctttacatgaggatgaggaatcaagctcataggagagaaaactatccactggcttctgaccctcaaaaccgaaacaactttgcatcatggaggcaaagtgagctcgagaggatgtccccagaagaaatgctggctacctcaaggtctgactactactgttggtgtttggactctgaatgagcattgaacgccagcatatatatgtgtagttctcatgtggtcaaacaggtgttccattctgattaaagtttaaggatgcta

SEQ ID NO: 353 - DNA, 4581 bp, Theobroma cacao
  source 1..4581: mol_type = other DNA
aaaatcatgacaccagattaaagaagaatacaaaacccgacactcaacattcctagttacgcaaagaccagcttagcactgtcctcaaattaacatatggacaagtatctcaaagcttgattcactagagtgtgatcccacacttagcaagacgcaacgacagtggagtaacagcagcatccagtcccacagatatcagctgacgacaagagcttccaaactcaaacagaaacccaggccatccaaccctagcatcaagaaagtaccttggtatcatttcaaagctcagcaccaacaggtatcacaactcagcattcgaatctaacttgtgtggtaattttttcaaagaaggaattttattgtaatgacttttttctagagtaagtttgttgtgaaagtgaggggatgaactggagatgagatggaatggaatggaatggagctttagtgaagtaagagggagagaggatctgatcccccggttaggtcaaaggggcaactttatttatttttttggacctttttgaaaggttctgatctcttttctttcttttcaattttgacttttattgattcactgaaaattaaggggatataacatatgtgtggttcaaaatgccaaatagtttggccacagactggccccctcaatgacattaattccttcacctcctttgaaactagtcaaaaataagctttttctgtagtgaaccaagctgtgcaggttctatatgagggttacagtcagcagggtgcatatggaccatttcttcatccactgtacatgtgcagttttaagttgaagggtacccccatttatatatcatcagattcccatacccaacaatgttttcaccaatgattttagaataattgccaatgtaggtcaggcattaagttaaagaacttttaacatgatcgatgtctaggcgatcgacatttttaaatcaaatattaataaataaagaatcgagatgtctcatctttttatttttttttaaaaatattatatcaaataaatcgatataaataaagaaagacaaaacatatcgcagttaatttttcttactaaaaagcaagttgtgattagagcccaagtttgccaacaggttacagctgcccctttttatagcatgcctaagggcattccaacatgcatgtaagtgattaaaaaccatcatatacacacagaaatttaatgcacaagctgctccaataatctatgtaagtaagagttatcagaggataaagaaattgaatttatggcaattcccatatataattttcaacaggagtaggaacatacacatcttagttgatttggaaaaattttatcaaatgctaaactatgtaaaagtgtcaatggggaagctgtgattgagaaaaagccagttatcttcgtcgaagggagggcaatctctggggtggattctgtttgacttgtgaatatagagacgtttatgggaatgatggaaatgggcttgtatggaacagaatcattaagggaaaaaaagtgctctttcacctacaacttttctgttgggtatcttcttcaaaagcaacatggagggaatctccaccagggtccctttagagtcaaaagtgactctttgctgaaattccccatgttttgtttttcttaaagtcaaacctctttctttcttggaaggagaagtaagtaattgtgcttaagcttatgcaaacaaccttatctgccttcgccgaaagtaaaggggcttaaacttgaataactatgagggttttaccatgagtctctaaagcccattacccattggcatttgcttttgctggacagtttttgtcatgtcagccaacttggtcttgcccttttttccttcacagtgcaagacaaaagagataagctatggcattttccagcttgaaaaagaccttatccctgcctttgccgaaagtaaaaggagattaaacttgatcacgaacttaccccccattttatgctgggcaattttatccttttgtcttgtcagccaacttgggtttggccttttctccatccgcattcaaattcgggagtttgtgaacttcctacgtttgtgatagaaaagcaaacgatggaaacaacgcaatctttgaccaaatcttcatggaaaaagtaagccatggacattgtttgcattagtgaatagtgccttaagtcacacgacttcttaaagaagtatgaccaaagtagctcgtgttcatcacttgcaccagtcttgtgttaaatgcaccacaaaaaacctctataaagagggaaattcagtatcaaactgatgactaaaagtgtaggcctctgatcaatttatactacaaaaagaatagttaacatgttgtttagcgcattaagtaaagctaaccatgcacacgggcttgcgcacgttcatgtgtaaactctcacatacacatgcacacatataaaaagcaagggagggatggaggagacaaagagtgaaatattctagttgatcagtggggctccaagcatctggattactacgaatgttctggtgcagagatagagcttcaaaattcaagtaattttcctcaaggaatcatccttaggctcaagtgggacacaaatttcttccttaactgatataaataccctcccctattccctcttctttcctcaggtccttctaaagtaacacacgctaaattttcgacgctcatcataacaagatggagtcttcagaaagcatgcggtattctctcttcttacctgctcacacaaacatgcaaacacacacaggcatgcacacataaaatcacactaacatatgtatataagcaacaaacagaaagcactttgtagataaatactatagcacaaatgattttaatgctaaattgatcaaattattcgagctgcaggaacaaatgcgcggcatgcttcagacagttcatcagaatggagcacctggtcgaccacatgagaactacatatcattcagttcatgaacctacttgcggagtgtgtaagaaacactgcaggtcgtttgaatcgctaagggaacatcttataggtaagtaataaatactagcacatccataggtcttgttaatccaaaggttttctgaggacggactcttgactcttgagtactattttgttccaaataggtccattgccgaaacaagagtgcaagaatttgttcaacatccgaggatgcaaattctgcttagccattctggatagcccatatgctcttaggatccatcaagacagatgccagctctcgggagtaaattatgtatgaacccttagcttgaaattaaaactacatatttcaactatatttccttccccctattcgcaaattaagtttacactgaaatttttacatgatatctccttgtagggaatagcggctcgtctggctaacttaggtcttcgtgatagcttgacaatcgacaatggtttttcaagaggcccgcaagtagttgcactagcttgcaaaatggttggtgctggcagtgacggctcattagatctttgtgcaagggtttgcatcattgatgaaaatgagaatatgatctaccatacttatgtcaaaccaccaattccagttacaaactacaggtaccattaatgaaaatgagaatatgactatgccaatatgcgaattctgagaattccaacaaatggaatcaaacaaaccaattaggttttcttcaactactttcaggtatgaaaccacaggcattcgaccagaatatttgagagatgcaacgccattgagacaagtgcaaagaaggattcaagacttccttttcaatggagaaccaatgtggaaaattcgatcacctaaaggtggaaaagccaggattctcgtgggtcatggtcttgatcatgaccttgaccgtctccaagtagaatacccagcaatcatgataaggtaaagtttaaggatgctagcatacattcaaaaggaacaggtgctgctgcaattattttatagtctaaattgcacattcatcttttccctatatattctacttctagagacacagctcaatgatgaaattcatgtggaaaatacaattaatatggtataagtttatgtgcctacagggatactgcaaaatatcctccgttaatgaaaacaagcaaacttagcaactcactcaagtacttaacccaagcatacctggggtaagcgtctatacacaatatctatttaatttcctcatgatcatatctgtcgataattattcaatgatgcaacttctacattcaggtatgacatccaaaccggcattcaagacccttatgaggactgcgttgccacaatgaggctttacatgaggatgaggaatcaagctcataggagagaaaactatccactggcttctgaccctcaaaaccgaaacaactttgcatcatggaggcaaagtgagctcgagaggatgtccccagaagaaatgctggctacctcaaggtctgactactactgttggtgtttggactctgaatgagcattgaacgccagcatatatatgtgtagttctcatgtggtcaaacaggtgttccattctgattaaagtttaaggatgcta

SEQ ID NO: 354 - protein, 364 aa, Theobroma cacao
MASEPDPSESRTQRHKCPACYKQFKRKLHLIEHMKISYHSVHQPRCGVCQKHCKSFESVREHISGPLAKSNCSKIFLNQGCNLCLKVLDSPAALNEHKQKCCLNAPVPLGTKIMPCIESHVILSGSIMDERHNGKGHGAIAIDCEMVGGGSDGSIDLCARVCLVDEDENLIFHTYVQPQIPVSNYRYEVTGVTEDHLRDAMPLNEVQDKILKILYNGESVGRIRLDGEKVRLLVGHGIQHDLDCLRMKYPGQLLRDTAKYRPLMKTNLLSHSLKHLTKTYLGYDIQSGIHDPYEDCISVMRLYKRMRGQDHQVEGLGNERANSGFDSIRSTELEKLTPDELYEISISDYKCWCLDLSKECSLGS

SEQ ID NO: 355 - DNA, 1522 bp, Theobroma cacao
  source 1..1522: mol_type = other DNA
ctttggaaaatgcttcacgccaaaacaataaacaccccacgcccatacacaccggaaaattccccgtcattttcatctccggatctagtaccccatggcctccgaacctgatccttcagaatcccgaacccaaaggcacaaatgccctgcatgctataaacaatttaagagaaagctgcatcttatagagcatatgaaaatctcataccattcagttcatcaacctagatgcggggtgtgccaaaagcactgcaaatcttttgaatcagtgcgagaacatattagtggtccattggcaaagtcaaattgttcgaagatttttttgaaccaaggttgtaatctttgtttaaaagttctggatagccctgctgcccttaatgaacataaacaaaagtgctgcctaaatgctcctgttccccttggaacaaagatcatgccttgtatagaatctcatgttattttgtcaggttcaatcatggacgaaaggcacaatggtaaaggtcatggagccattgctattgattgtgaaatggttggtggtggtagtgatggatcaattgacctttgtgctagggtatgtcttgttgatgaagatgagaatctaattttccacacatatgttcaaccacaaattccagtcagtaattatagatatgaagtaactggggtaacagaagaccatttgagagatgccatgccacttaacgaagtgcaagataaaatattgaaaattctgtacaacggagagtctgttggaaggattcgcctagatggggaaaaggttaggcttcttgtgggtcatgggatacagcatgatttggactgcttgagaatgaaatatcctggccagctgctgagggacactgcaaaataccgtccgttgatgaaaacaaatcttcttagtcactcactgaagcaccttaccaaaacatatctagggtatgatatccagtcaggcattcacgatccgtatgaagattgtatctctgtgatgagactgtacaagagaatgcgtggccaagaccatcaggtggaaggacttggaaatgaaagagcaaatagcggcttcgattctattagatccacagaactagagaagctgactccagatgagctatatgagatctctatatctgattacaagtgttggtgtctagacttgagcaaggaatgcagccttggcagctgattttccttttttttgttttttttcaactgaacatttagtcttggcagggcatgttaagaagcgtctgccattggtgctttgtgtcccctagtgtgggcgtcatttgggcttaaaacttttcgaatttgacaggagagcagtaaaaaaaagagaggatagaggagagaagtgaaaacaagcaagtcacaatagaaagtcaacttgtaactgcttggattgtatatataacaagagaaattatggggacggttgatgttttactagataatgtgattgtaggaaatataatcattgagaatagaacattgcaacatttgtaaaggtcaattgctg

SEQ ID NO: 356 - DNA, 3438 bp, Theobroma cacao
  source 1..3438: mol_type = other DNA
ctttggaaaatgcttcacgccaaaacaataaacaccccacgcccatacacaccggaaaattccccgtcattttcatctccggatctagtaccccatggcctccgaacctgatccttcagaatcccgaacccaaaggtcccatgtctctctttctctatatttatgcttgtgctctttctgattgttggtcatttattgatgagacatgtttggatgcctagaaaatatgggaaagaatacggacgaaaatgcgtgtcattggttcatttactttgtttttagttgatcaactcctgggtactaaaaagatagtaacaaatttatttgtttcctcgcagtttctcagaatctctctgctttcccctcttacagttttgtttgtttccatatgaggttttagctgatttcaataatttttctgggatattaaatgctactttacgttttacttaattttgatcacttatgttgttgctgtttcaagttagcgtctgatcgatcacacttttacgttttgctcttttagcaaaaaaaaaaaaaaaaagaaaattgaatatgaggcacaatacaaatagtaaagggtaaaatgtaaaagtatcaatcaaacgaagtcttaggaccaagatttggtagacatagagaatatacatcagctatcataatgtaggcaatttgagtttaactgttgaagtatgatactgtgaaatacgggaaaaaatggatattgctgagaagtttccacttttgctgcttcagacataaactatgtgataataactctctatttagatctttaagctgatattgtctttgtttttcttgatgatgatacattggttgtgcttgtaatgcatgtaagtgtaacgatcttttttccattatttttgttacaggcacaaatgccctgcatgctataaacaatttaagagaaagctgcatcttatagagcatatgaaaatctcataccattcagttcatcaacctagatgcggggtgtgccaaaagcactgcaaatcttttgaatcagtgcgagaacatattagtggtgagataatatgcatgttcattctcatttgtcaatttttattgtgtaagcatctcatctctttccttttacataggtccattggcaaagtcaaattgttcgaagatttttttgaaccaaggttgtaatctttgtttaaaagttctggatagccctgctgcccttaatgaacataaacaaaagtgctgcctaaatgctcctgttccccttgtaagtagcccagtgaaactattaaaatgctaaaatagaatcttatcaatgatggagctttcccccctccgcccttctttatttatctataacaatatgttatatatgccctttggacacatgttttactatatttctcttgtattttgtgttttggatgccttatttgtaagttatatgataaaatgaatcatgaaaacaaggaaaaagtacattttggttaaagttgagtaactggtgcatagtgacctttctaatcacattcatactgcagaataacttgttttgggtcgttatttaattcattgccaaatataacctaaatattatgttgactgttgcagggaacaaagatcatgccttgtatagaatctcatgttattttgtcaggttcaatcatggacgaaaggcacaatggtaaaggtcatggagccattgctattgattgtgaaatggttggtggtggtagtgatggatcaattgacctttgtgctagggtatgtcttgttgatgaagatgagaatctaattttccacacatatgttcaaccacaaattccagtcagtaattataggtaccatgctccgtattttattttatttaataaggtcattttaaaggaatagttcctttatctccatatatatgtttcagatatgaagtaactggggtaacagaagaccatttgagagatgccatgccacttaacgaagtgcaagataaaatattgaaaattctgtacaacggagagtctgttggaaggattcgcctagatggggaaaaggttaggcttcttgtgggtcatgggatacagcatgatttggactgcttgagaatgaaatatcctggccagctgctgaggtatattgaactatttctatcgctgtaaacacagcaacccatctaaatttcttcttgaggaatcagtttgttgaagctgctgtctgtaattttattggaaccctatgtgatgtcatttcttgtgtttcctcactcattcgatggtataacttagttcacttctagatgaaatatatccaagatataactactttaagcgttaacaaaattaactcgttctgttgtgttttgcatctcatttaatcctatactttgtttattaatcactttttaactctatctaaggacttaattggctttgtaaggaaaggatgcattgcattgtctagtcaaacagagtggaaaaataaagtgtagaagaattgggatgattttagattgtcctgctgttttcactttctgatttgacatggacttctttcgacaacccctccccccttcctgccctttttcttcatttcttttttcttattaaagatgttgtgcagaaatgtcctcccttacatgggcttttctattgtgcagggacactgcaaaataccgtccgttgatgaaaacaaatcttcttagtcactcactgaagcaccttaccaaaacatatctagggtaagctactatttcaggatctattacacattttggagttatttcttgctcattaaatttgctgctgctgctcactgtatcttctttcttgttacacccttttcctctagcatcaacgtgcattgttttacaggtatgatatccagtcaggcattcacgatccgtatgaagattgtatctctgtgatgagactgtacaagagaatgcgtggccaagaccatcaggtggaaggacttggaaatgaaagagcaaatagcggcttcgattctattagatccacagaactagagaagctgactccagatgagctatatgagatctctatatctgattacaagtgttggtgtctagacttgagcaaggaatgcagccttggcagctgattttccttttttttgttttttttcaactgaacatttagtcttggcagggcatgttaagaagcgtctgccattggtgctttgtgtcccctagtgtgggcgtcatttgggcttaaaacttttcgaatttgacaggagagcagtaaaaaaaagagaggatagaggagagaagtgaaaacaagcaagtcacaatagaaagtcaacttgtaactgcttggattgtatatataacaagagaaattatggggacggttgatgttttactagataatgtgattgtaggaaatataatcattgagaatagaacattgcaacatttgtaaaggtcaattgctg

SEQ ID NO: 357 - protein, 350 aa, Theobroma cacao
MGSRHESSETLRNKCAACYRQFNKMEHLVEHMRTSYHSVHEPMCGICRKHCRSFESLREHLIGPLPKAECERIFKDRGCDLCLTVLSSRSGLWNHREACQFSRSNNGVLCRLANLGIQDELRLDNSRAKVVALACKMVGGGSDGSLDLCARVCLIDEHERIIFHTYVKPQLPVTNYRYETTGLRPEFLREAMPLKQVQRRIQDYLCNGEPIWHIRSRGGRARVLVGHGLDHDLKCLEMEDTAKYPPLMKTSKLSNSLKYLTKAYLGYDIQTGQQDPYEDCVATLRLYMRMRSQNHDTEDCPLATDPQNRNNFASWRQNELERMTPEKLLEISRSDYYCWCLDSRTSHTNS

SEQ ID NO: 358 - DNA, 1053 bp, Coffea arabica
  source 1..1053: mol_type = other DNA
atgggcagcaggcacgagtcttccgagactctgaggaacaaatgcgctgcatgctataggcagttcaacaaaatggaacaccttgtggaacacatgaggacatcctatcattcggttcatgaacccatgtgcgggatttgcaggaaacattgtcgatcatttgaatctctgagagaacatcttatagggccgctcccgaaagcagaatgtgagaggattttcaaggaccggggatgtgacctttgcctaacagtcctgagcagtcgcagtgggctctggaatcaccgggaagcatgccaattctcacgttcgaacaatggggttctgtgtcgtctggcaaatttgggcatacaagatgaattaaggctggacaacagtagagcgaaggtggtcgccctggcttgcaaaatggttggaggcggtagcgatggctctttagatctgtgtgcaagagtttgcctcatcgatgagcacgaaaggataatctttcatacatatgtcaagccacagcttcccgtcacaaactacaggtatgaaacaacgggattgcgaccagaatttctaagggaagcgatgccgttgaaacaagtgcagagaaggattcaggactatttatgcaacggggaaccaatatggcacatacgttctagaggaggaagagctcgcgtccttgtgggacatggtttggatcacgatctcaagtgtttggaaatggaggacacggccaaatatccaccacttatgaaaaccagcaagcttagcaactcgctcaagtatttgacaaaagcataccttggctatgacattcaaacgggccagcaagatccgtatgaagactgcgttgctacactgaggctctacatgagaatgagatcacagaatcacgatacggaggactgccctcttgctaccgacccccagaaccgcaacaattttgcatcatggcgacagaacgagctcgagaggatgactcctgaaaaattgctagagatctcaaggtctgactattattgctggtgcttggactccagaaccagccacaccaattcctga

SEQ ID NO: 359 - DNA, 1745 bp, Coffea arabica
  source 1..1745: mol_type = other DNA
atgggcagcaggcacgagtcttccgagactctgaggtaaaatctctaccgtgctattgaatacttgttttatttattgttacctcctgatcaagatgaaaaggttcatgttgtgcatgaaaaagagagaggcaataatttagcgtttcatgatgatgctgtctataatgtctcaggaacaaatgcgctgcatgctataggcagttcaacaaaatggaacaccttgtggaacacatgaggacatcctatcattcggttcatgaacccatgtgcgggatttgcaggaaacattgtcgatcatttgaatctctgagagaacatcttataggttaattaaatcatttctgtcctagcgaacacagtaattattcaaccattttcggctctctgccttttccatttgatctgatgtggttggttggttctgacacatgcgggattgaattgcaaaaccagggccgctcccgaaagcagaatgtgagaggattttcaaggaccggggatgtgacctttgcctaacagtcctgagcagtcgcagtgggctctggaatcaccgggaagcatgccaattctcacgttcgaacaatgtatggaacgacagttaaactcagctatatgttcgcatttccattccacgacaaatagtaaaacttttttgtttttgtagggggttctgtgtcgtctggcaaatttgggcatacaagatgaattaaggctggacaacagtagagcgaaggtggtcgccctggcttgcaaaatggttggaggcggtagcgatggctctttagatctgtgtgcaagagtttgcctcatcgatgagcacgaaaggataatctttcatacatatgtcaagccacagcttcccgtcacaaactacaggtaatggcgcaacaaaaagatcatcaaaattcacatactacacaggcacatagacagtgaatttgcactctagagacggactttgaaaaattcttccgcaggtatgaaacaacgggattgcgaccagaatttctaagggaagcgatgccgttgaaacaagtgcagagaaggattcaggactatttatgcaacggggaaccaatatggcacatacgttctagaggaggaagagctcgcgtccttgtgggacatggtttggatcacgatctcaagtgtttggaaatggagtatccaccgataatgatcaggcaagttagctagttacggggccacccaccaattatatatatatatacacactttgctgcaggaacaccaattttgacacctgtgaaactccttttttttcctgaaaaaaaaaattttttggcagggacacggccaaatatccaccacttatgaaaaccagcaagcttagcaactcgctcaagtatttgacaaaagcataccttgggtatgtagcttcattaaactctggatgttagtagtacattacatcaagaataacaacatcatgtttttttctttttgggggtggcggcggtgggcagctatgacattcaaacgggccagcaagatccgtatgaagactgcgttgctacactgaggctctacatgagaatgagatcacagaatcacgatacggaggactgccctcttgctaccgacccccagaaccgcaacaattttgcatcatggcgacagaacgagctcgagaggatgactcctgaaaaattgctagagatctcaaggtctgactattattgctggtgcttggactccagaaccagccacaccaattcctga

SEQ ID NO: 360 - protein, 326 aa, Coffea arabica
MEHLVEHMRTSYHSVHEPMCGICRKHCRSFESLREHLIGPLPKAECERIFKDRGCDLCLTVLSSRSALWNHREACQFSRSNNGVLCRLANLGIQDELRLDNSRAKVVALACKMVGGGSDGSLDLCARICLIDEHERIIFHAYVKPQLPVTNYRYETTGLRPEFLREAMPLKQVQRRIQDYLCNGEPIWHIRSRGGRARVLVGHGLDHDLKCLEMEDTAKYPPLMKTSKLSNSLKYLTKAYLGYDIQTGQQDPYEDCVATLRLYMRMRSQNHDTEDCPLATDPQNRNNFASWRQNELERMTPEKLLEISRSDYYCWCLDSRTSHTNS

SEQ ID NO: 361 - DNA, 981 bp, Coffea arabica
  source 1..981: mol_type = other DNA
atggaacaccttgtggaacacatgaggacatcctatcattcggttcatgaacccatgtgcggaatttgcaggaaacattgtcgatcatttgaatctctgagagaacatcttatagggccgctcccgaaagcagaatgtgagaggattttcaaggaccggggatgtgacctttgcttaacagtcctgagcagtcgcagtgcgctctggaatcaccgggaagcatgccaattctcacgttcgaacaatggggttctgtgtcgtctggcaaatttgggcatacaagatgaattaaggctggacaacagtagagcgaaggtggtcgccctggcttgcaaaatggttggaggcggtagcgatggttctttagatctgtgtgcaagaatttgcctcatcgatgagcacgaaaggataatctttcatgcatatgtcaagccacagcttcccgtcacaaactacaggtatgaaacaacgggattgcgaccagaatttctaagggaagcgatgccgttgaaacaagtgcagagaaggattcaggactatttatgcaacggggaaccaatatggcacatccgttctagaggaggaagagctcgcgtccttgtgggacatggtttggatcacgatcttaagtgtttggaaatggaggacacggccaaatatccaccacttatgaaaaccagcaagcttagcaactcgctcaagtatttgacaaaagcataccttggctatgacattcaaacgggccagcaagatccgtatgaagactgcgttgctacactgaggctctacatgagaatgagatcacagaatcacgatacggaggactgccctcttgctaccgacccccagaaccgcaacaattttgcgtcatggcgacagaacgagctcgagaggatgactcctgaaaaattgctagagatctcaaggtctgactattattgctggtgcttggactccagaaccagccacaccaattcttga

SEQ ID NO: 362 - DNA, 1573 bp, Coffea arabica
  source 1..1573: mol_type = other DNA
atggaacaccttgtggaacacatgaggacatcctatcattcggttcatgaacccatgtgcggaatttgcaggaaacattgtcgatcatttgaatctctgagagaacatcttataggttaattaaatcatttctgtcctagccaacacagtaattattcaaccattttcggctctctgccttttccatttgatctgatgtggttggttctgacacatgcgggattgaattgcaaaaccagggccgctcccgaaagcagaatgtgagaggattttcaaggaccggggatgtgacctttgcttaacagtcctgagcagtcgcagtgcgctctggaatcaccgggaagcatgccaattctcacgttcgaacaatgtatggaacgacaattaaactcaggtgtatattcgcatttccattccacgacaaatagtaaaacttttttgttttttgtacgtagggggttctgtgtcgtctggcaaatttgggcatacaagatgaattaaggctggacaacagtagagcgaaggtggtcgccctggcttgcaaaatggttggaggcggtagcgatggttctttagatctgtgtgcaagaatttgcctcatcgatgagcacgaaaggataatctttcatgcatatgtcaagccacagcttcccgtcacaaactacaggtaatggagcaacaaaaagatcgtcaaaattcacatactacataggcacatagaaagtgaatttgcactctagctagagacggactttgaaaaattcttctgcaggtatgaaacaacgggattgcgaccagaatttctaagggaagcgatgccgttgaaacaagtgcagagaaggattcaggactatttatgcaacggggaaccaatatggcacatccgttctagaggaggaagagctcgcgtccttgtgggacatggtttggatcacgatcttaagtgtttggaaatggagtatccaccgataatgatcaggcaagttagctagttacggggccgcccaccaattatatatatatactttgctgcaggaacaccaattttgacgcctatgaaactccttttttttttctgaaaaaaaatttttttggcagggacacggccaaatatccaccacttatgaaaaccagcaagcttagcaactcgctcaagtatttgacaaaagcataccttgggtaagtagcttaattaaagtctggatgttagtagtacattacatcaagaataacaacatcatgattttttttttattttttttttggggactctgctaaggaaaatgtttttttctttttggtggtggtggtgggcagctatgacattcaaacgggccagcaagatccgtatgaagactgcgttgctacactgaggctctacatgagaatgagatcacagaatcacgatacggaggactgccctcttgctaccgacccccagaaccgcaacaattttgcgtcatggcgacagaacgagctcgagaggatgactcctgaaaaattgctagagatctcaaggtctgactattattgctggtgcttggactccagaaccagccacaccaattcttga

SEQ ID NO: 363 - protein, 326 aa, Coffea arabica; identical to SEQ ID NO: 360

SEQ ID NO: 364 - DNA, 981 bp, Coffea arabica; identical to SEQ ID NO: 361
  source 1..981: mol_type = other DNA

SEQ ID NO: 365 - DNA, 1570 bp, Coffea arabica
  source 1..1570: mol_type = other DNA
atggaacaccttgtggaacacatgaggacatcctatcattcggttcatgaacccatgtgcggaatttgcaggaaacattgtcgatcatttgaatctctgagagaacatcttataggttaattaaatcatttctgtcctagccaacacagtaattattcaaccattttcggctctctgccttttccatttgatctgatgtggttggttctgacacatgcgggattgaattgcaaaaccagggccgctcccgaaagcagaatgtgagaggattttcaaggaccggggatgtgacctttgcttaacagtcctgagcagtcgcagtgcgctctggaatcaccgggaagcatgccaattctcacgttcgaacaatgtatggaacgacaattaaactcagtgtatattcgcatttccattccacgacaaatagtaaaacttttttgttttttgtacgtagggggttctgtgtcgtctggcaaatttgggcatacaagatgaattaaggctggacaacagtagagcgaaggtggtcgccctggcttgcaaaatggttggaggcggtagcgatggttctttagatctgtgtgcaagaatttgcctcatcgatgagcacgaaaggataatctttcatgcatatgtcaagccacagcttcccgtcacaaactacaggtaatggagcaacaaaaagatcgtcaaaattcacatactacataggcacatagaaagtgaatttgcactctagctagagacggactttgaaaaattcttctgcaggtatgaaacaacgggattgcgaccagaatttctaagggaagcgatgccgttgaaacaagtgcagagaaggattcaggactatttatgcaacggggaaccaatatggcacatccgttctagaggaggaagagctcgcgtccttgtgggacatggtttggatcacgatcttaagtgtttggaaatggagtatccaccgataatgatcaggcaagttagctagttacggggccgcccaccaattatatatatatactttgctgcaggaacaccaattttgacgcctatgaaactccttttttttttctgaaaaaaaatttttttggcagggacacggccaaatatccaccacttatgaaaaccagcaagcttagcaactcgctcaagtatttgacaaaagcataccttgggtaagtagcttaattaaagtctggatgttagtagtacattacatcaagaataacaacatcatgattttttttttatttttttttggggactctgctaaggaaaatgttttttctttttggtggtggtggtgggcagctatgacattcaaacgggccagcaagatccgtatgaagactgcgttgctacactgaggctctacatgagaatgagatcacagaatcacgatacggaggactgccctcttgctaccgacccccagaaccgcaacaattttgcgtcatggcgacagaacgagctcgagaggatgactcctgaaaaattgctagagatctcaaggtctgactattattgctggtgcttggactccagaaccagccacaccaattcttga

SEQ ID NO: 366 - protein, 350 aa, Coffea arabica
MESSDTLRNKCAACYRQFNKMEHLVEHMRTSYHSVHEPTCGICKKHCRSFESLREHLIGPLPKAECERIFKERGCDLCLTTLSSRNALRVHRETCQLSRPSPGLLYRMANLGIYDDLKIDNSRTKVAALACKMVGGGSDGTLDLCARVSLIDEYENIIFHTYVKPHLPVTNYRYETTGVRPEFLRDAIPLRQASRKIQDFLCNGEPLWKIRSRGGKATILIGHGLDHDLKCLEVEYPAIMIRDTAKYPPLMKTSKLSNSLKYLTKAYLGYDIQTGIQDPYDDCVATMRLYMRMRSQVHKLEDYPLATDPQNRNNFAQWRQSELERMNPEEMLEISRSDFYCWCLDSKESF

SEQ ID NO: 367 - DNA, 1337 bp, Camellia sinesis
  source 1..1337: mol_type = other DNA
agatactccaaaggtcagtcttcttatctctcaagtagggctctgattcactagctactttagtggacaacggaatggagtcttcagacactcttcggaacaagtgcgcagcatgctatagacagttcaacaaaatggagcatctagtggaacacatgaggacatcttatcactcagttcatgaacccacatgtggaatttgcaagaaacattgccgatcatttgaatctctgagggagcatctcatagggccattgccaaaggcagaatgtgaaaggatattcaaagaacgaggatgcgacctttgcttaaccacccttagcagccgaaatgctcttagggtccaccgagagacatgccaactctcacgtccgagccctggcctactttatcgcatggctaacttaggcatctatgatgacttgaagattgacaacagtagaacaaaggttgctgcacttgcttgcaaaatggttggtggtggcagtgatggcaccttagatctttgtgcaagggtttccctaattgatgaatatgagaacatcatctttcacacctatgtcaagcctcatcttcctgtcacgaactataggtatgagacaacaggcgtacgaccagaattcttaagagatgcaataccactgaggcaagcatcaaggaagatccaagattttttatgcaatggtgaaccattatggaaaatccgatctagaggtggaaaagcaacaattctcataggtcatggcttggatcacgatcttaaatgcttagaagtggagtacccagcaataatgatcagggacacagcgaaatatcctccactgatgaaaacaagcaaactcagcaactctctgaagtacctaacaaaagcatacctcgggtatgacattcaaactggtatacaagatccttatgatgactgtgtagctacaatgaggctttacatgagaatgaggtcccaagttcataaactggaggactacccacttgctactgacccacagaaccgtaacaattttgcacaatggaggcaaagcgaacttgagagaatgaatccagaggaaatgttggaaatctcaaggtctgatttctattgttggtgctcggactctaaagaaagtttctgaatattgaagaaggctaacatgttctaggaggcagacataaaatagtgagtctaaaactccacgagtgagcaaacctataattatgaaacaataaacatggaaatgtagctcatttccattatgtattaactatgcgaaacaaaatccatgtaccttgttgtgatattgtatgtgactttataatgaataatttaccttcacttactgaag

SEQ ID NO: 368 - protein, 348 aa, Camellia sinesis
MTSVTRNKCAACYRQFNKMEHLVEHMRTSYHSVHEPTCGICKKHCRSFESLREHLIGPLPKAECERIFKERGCDLCLTTLSSRNALRVHRETCQLSRPSPGLLYRMANLGIYDDLKIDNSRTKVVALACKMVGGGSDGTLDLCARVSLIDEYENIIFHTYVKPHLPVTNYRYETTGVRPEFLRDAIPLRQASRKIQDFLCNGEPLWKIRSRGGKATILIGHGLDHDLKCLEVEYPAIMIRDTAKYPPLMKTSKLSNSLKYLTKAYLGYDIQTGIQDPYDDCVATMRLYMRMRSQVHKLEDYPLATDPQNRNNFAQWRQSELERMNPEEMLEISRSDFYCWCSDSKESF

SEQ ID NO: 369 - DNA, 1047 bp, Camellia sinesis
  source 1..1047: mol_type = other DNA
atgacttctgtaaccaggaacaagtgcgcagcatgctatagacagttcaacaaaatggagcatctagtggaacacatgaggacatcttatcactcagttcatgaacccacatgtggaatttgcaagaaacattgccgatcatttgaatctctgagggagcatctcatagggccattgccaaaggcagaatgtgaaaggatattcaaagaacgaggatgtgacctttgcttaaccacccttagcagccgaaatgctcttagggtccaccgagagacatgccaactctcacgtccgagccctggcctactttatcgcatggctaacttaggcatctatgatgacttgaagattgacaacagtagaacaaaggttgttgcacttgcttgcaaaatggttggtggtggcagtgatggcaccttagatctttgtgcaagggtttccctaattgatgaatatgagaacatcatctttcacacctatgtcaagcctcatcttcctgtcacgaactataggtatgagacaacaggcgtacgaccagaattcttaagagatgctataccactgaggcaagcatcaaggaagatccaagattttttatgcaatggtgaaccattatggaaaatccgatctagaggtggaaaagcaacaattctcataggtcatggcttggatcacgatcttaaatgcttagaagtggagtacccagcaataatgatcagggacacagcgaaatatcctccactgatgaaaacaagcaaactcagcaactctctgaagtacctaacaaaagcatacctcgggtatgacattcaaactggtatacaagatccttatgatgactgtgtagctacaatgaggctttacatgagaatgaggtcccaagttcataaactggaggactacccacttgctactgacccacagaaccgtaacaattttgcacaatggaggcaaagcgaacttgagagaatgaatccagaggaaatgttggaaatctcaaggtctgatttctattgttggtgctcggactctaaagaaagtttctga

SEQ ID NO: 370 - DNA, 1621 bp, Camellia sinesis
  source 1..1621: mol_type = other DNA
atgacttctgtaaccaggaacaagtgcgcagcatgctatagacagttcaacaaaatggagcatctagtggaacacatgaggacatcttatcactcagttcatgaacccacatgtggaatttgcaagaaacattgccgatcatttgaatctctgagggagcatctcataggtaaacttttaattcacaaccagagctctgctgatatttttcttcataaaattgatcttgattacaatgttactcatttgcttcttcagggccattgccaaaggcagaatgtgaaaggatattcaaagaacgaggatgtgacctttgcttaaccacccttagcagccgaaatgctcttagggtccaccgagagacatgccaactctcacgtccgagccctgtaaaaatcctcatacttgctattgaggcacaaaataccccctttttttttccttccttttcattttccatagtgattctaaaacccacaacctattttgattttttcagggcctactttatcgcatggctaacttaggcatctatgatgacttgaagattgacaacagtagaacaaaggttgttgcacttgcttgcaaaatggttggtggtggcagtgatggcaccttagatctttgtgcaagggtttccctaattgatgaatatgagaacatcatctttcacacctatgtcaagcctcatcttcctgtcacgaactataggtactaatgagtttatattgagattcccaagtaactgctgcttactaaataccatactctaatcaagggttaattttacttaggtatgagacaacaggcgtacgaccagaattcttaagagatgctataccactgaggcaagcatcaaggaagatccaagattttttatgcaatggtgaaccattatggaaaatccgatctagaggtggaaaagcaacaattctcataggtcatggcttggatcacgatcttaaatgcttagaagtggagtacccagcaataatgatcaggtaagctgagtaaggaagctcgtgagtcctgacatccaagatttcaagccatcagcagtccagttttttaatagctatttggcatcacttcgtattctatacaattgaaagaattggactgtaaagatataaactcattgctacagccccatgttcaagacttaaattaaaattcaacgattttttcttttctttttttctacagggacacagcgaaatatcctccactgatgaaaacaagcaaactcagcaactctctgaagtacctaacaaaagcatacctcgggtaattacccttcatgcactatgatcctacagtcaaaaaattattaatataggtctttcaagtagtaacgaaaattctgttttacaggtatgacattcaaactggtatacaagatccttatgatgactgtgtagctacaatgaggctttacatgagaatgaggtcccaagttcataaactggaggactacccacttgctactgacccacagaaccgtaacaattttgcacaatggaggcaaagcgaacttgagagaatgaatccagaggaaatgttggaaatctcaaggtctgatttctattgttggtgctcggactctaaagaaagtttctga

SEQ ID NO: 371 - protein, 322 aa, Camellia sinesis
MEHLVEHMRTSYHSAHEPMCGICRKHCRSFESLREHLIGPLPKVECERIFKEQGCDLCLTIFSSRNALHVHREACQFSRGNNMGLTNRMANLGIQDDLKMDSSRARVVALACKMVGGGSDGSLDLCARVCLIDESEKIIFHTYVKPRLPVTKYRYETTGMRPEFLRDAMPLRQVQRKIQDYLCNGEPIWQIRSRAGKARILVGHGLDHDLKSLEVEDTADYPPLMKSSKLSNSLKYLTKTYLGYDIQTGIQDPYEDCVATMRLYMRMRSQRHKVEDYPLAQDPQNRNNFAAFRQSELERMAPEKMLEISRSDYYCWCLDSSS

SEQ ID NO: 372 - DNA, 969 bp, Olea europaea
  source 1..969: mol_type = other DNA
atggagcatttagtcgaacacatgaggacgtcgtaccattcagctcatgagcccatgtgtggaatttgtagaaagcattgccgatcgtttgagtctctacgggagcatcttataggacctttaccaaaggttgaatgtgaaaggatatttaaggaacaaggatgtgatctttgtttaaccatctttagtagccgtaacgctctccatgtccaccgagaggcatgccaattctcacgtggcaacaatatgggtctgacaaatcgaatggcaaacttgggcatccaggatgatttgaagatggatagtagtagagcaagagtggttgcacttgcttgcaaaatggtaggaggtggtagtgatggttccttagatctttgtgcaagggtttgcctcatcgatgaatccgaaaagataatctttcatacatatgtgaagccacgtcttccggtcacgaaatataggtatgaaacaacaggcatgagaccagaatttttacgggatgctatgccacttaggcaagtgcaaagaaagattcaagattacttatgtaatggggagcccatatggcagatccgctccagagctggaaaagctaggatccttgtaggccatggattagatcatgatttgaaaagccttgaagtagaggataccgcagattaccctccactgatgaaatcaagcaagctcagcaactcacttaaatatctaacgaaaacataccttggatatgacattcaaactggtattcaagatccctatgaagactgtgttgcaacaatgaggctgtacatgagaatgagatcacagcgtcataaagtggaagactatccgcttgctcaagacccacaaaatcgaaacaattttgctgcatttaggcaaagcgagcttgagaggatggctccagaaaagatgctggaaatctcaaggtctgattactattgctggtgcttagactctagcagctaa

SEQ ID NO: 373 - DNA, 1448 bp, Olea europaea
  source 1..1448: mol_type = other DNA
atggagcatttagtcgaacacatgaggacgtcgtaccattcagctcatgagcccatgtgtggaatttgtagaaagcattgccgatcgtttgagtctctacgggagcatcttataggtattcttcaatctcctagaagctataacatgttatgtgtcatttaagatttggcttctaacgcgtgttgatttcctatacaggacctttaccaaaggttgaatgtgaaaggatatttaaggaacaaggatgtgatctttgtttaaccatctttagtagccgtaacgctctccatgtccaccgagaggcatgccaattctcacgtggcaacaatatggtaaagatgctcattctaactatattttttaaacttttcagcataaaatctatacaaaatcaatcttgttggattttcttttacagggtctgacaaatcgaatggcaaacttgggcatccaggatgatttgaagatggatagtagtagagcaagagtggttgcacttgcttgcaaaatggtaggaggtggtagtgatggttccttagatctttgtgcaagggtttgcctcatcgatgaatccgaaaagataatctttcatacatatgtgaagccacgtcttccggtcacgaaatataggtaattaaatctttacaaaagaacggtaaattatgtcacaactatatttcgactaaacttgaaatcttgaaaacttttaggtatgaaacaacaggcatgagaccagaatttttacgggatgctatgccacttaggcaagtgcaaagaaagattcaagattacttatgtaatggggagcccatatggcagatccgctccagagctggaaaagctaggatccttgtaggccatggattagatcatgatttgaaaagccttgaagtagagtatccgcagatgatgaggaggcaagttaaccagcatataactaaagacttttatgtcatcaatcgttacactcaatgacttaaatctgaaccatcacacgaataaagacttctatgtcataaattgttgcacacagtgactggttgcggttttccacaatttaagaattaagctgatcatttttgtttgctcaagaacaaagaaaagaaaagttgaaatggtttcactaatctgagattttctctacagggataccgcagattaccctccactgatgaaatcaagcaagctcagcaactcacttaaatatctaacgaaaacataccttgggtagtagcttagccgaaatttttgtcacttttcagtttactcatcactcctgggagcatgacaaattttccttttacagatatgacattcaaactggtattcaagatccctatgaagactgtgttgcaacaatgaggctgtacatgagaatgagatcacagcgtcataaagtggaagactatccgcttgctcaagacccacaaaatcgaaacaattttgct

SEQ ID NO: 374 - protein, 320 aa, Olea europaea
MRTSYHSAHEPMCGICKKHCRSFESLREHLIGPLPKVECERIFKERGCDLCLTILSSRNALYVHREKCQFSRSNNIGLTHRMANLGIQDDLKIDNNRAKVVSLACKMVGGGSDGSLDLCARVCLIDEYEKIIFHTYVKPHLPVTNYRYETTGIRPEFLRDALPLWQVQKKIQDYLCNGEPVWQIRSRCGKGRILVGHGLDHDLKSLEVEYPQMMDTAKYPPLMKTSKLSNSLKYLMKAYLGYDIQIGIQDPYEDCVATMRLYMRMRSQRHKVEEYPLASEPQNRNNFAAWRQSELEKMSPEKMLDISRSDYHCWCLDSSS

SEQ ID NO: 375 - DNA, 963 bp, Olea europaea
  source 1..963: mol_type = other DNA
atgaggacgtcatatcattcagcacatgaacccatgtgtggaatttgtaaaaagcattgtcggtcatttgagtctctaagggaacatcttataggaccgttacccaaggtagaatgtgaaaggatatttaaggaaagagggtgtgatctttgtttaaccatccttagtagccgtaacgctctctacgtccaccgagagaaatgccaattctcacgcagcaacaatattggtctgacacatcgaatggcaaacttaggcattcaggatgatttgaagatcgataataatagagcaaaagtggtttcacttgcttgcaaaatggtcggtggaggtagtgatggctccttagatctttgtgcaagggtttgcctcattgatgagtatgagaagataatctttcatacatatgtgaagccacatctgcctgtcacaaactataggtatgaaacaacaggcataagaccagaatttttaagggatgctctgccgctttggcaagtgcaaaagaagattcaagattacttgtgtaatggggagcctgtatggcagatccgctccagatgtggaaaaggaaggatccttgtaggccatggattagatcacgatttgaaaagcctagaagtcgagtatccacagatgatggacacagcaaaatatcctccactgatgaaaacgagcaagctgagcaactcgctgaaatatttaatgaaagcataccttggatatgacattcaaattggtattcaagatccctatgaagactgtgttgcaacaatgaggctgtacatgagaatgagatcacagcgtcataaagtggaagaatatccgcttgcttcagagccacaaaatagaaacaattttgcagcatggaggcaaagcgagcttgagaagatgtctccagaaaagatgttggatatctcaaggtctgattaccattgctggtgcttagactctagcagctaa

SEQ ID NO: 376 - DNA, 1553 bp, Olea europaea
  source 1..1553: mol_type = other DNA
atgaggacgtcatatcattcagcacatgaacccatgtgtggaatttgtaaaaagcattgtcggtcatttgagtctctaagggaacatcttataggtattcttcaaactccaagaagctacatcatgttctttgacatttaagatttggcttcttctaacatctttgattttatatataggaccgttacccaaggtagaatgtgaaaggatatttaaggaaagagggtgtgatctttgtttaaccatccttagtagccgtaacgctctctacgtccaccgagagaaatgccaattctcacgcagcaacaatattgtacagatgctcaaactagaatatctaactacattctttaaccttttcggcatagaatcaggataaaacaattcttgctgggttttcttttacagggtctgacacatcgaatggcaaacttaggcattcaggatgatttgaagatcgataataatagagcaaaagtggtttcacttgcttgcaaaatggtcggtggaggtagtgatggctccttagatctttgtgcaagggtttgcctcattgatgagtatgagaagataatctttcatacatatgtgaagccacatctgcctgtcacaaactataggtaatgaaatatttacaaaacaatggtaaattatgtcacgagtaaattctgactgaacttgaaatcttaaaaacttttaggtatgaaacaacaggcataagaccagaatttttaagggatgctctgccgctttggcaagtgcaaaagaagattcaagattacttgtgtaatggggagcctgtatggcagatccgctccagatgtggaaaaggaaggatccttgtaggccatggattagatcacgatttgaaaagcctagaagtcgagtatccacagatgatgttaaggcaagttctctcagctgaaccagcacataactaaagacttttatgtcataaattgataccctcgatgactttagtctgaaccagcacatgactaaagacttctatgtcataaattgttgcccacagtgactagttctgatttttcacaaattcaatgtgatgctgctcatttttgtttgccataagaacaaagaaaataaaaattttgaaatggagtcactagtcttagaattctttctacagggacacagcaaaatatcctccactgatgaaaacgagcaagctgagcaactcgctgaaatatttaatgaaagcataccttgggtaattgctttgctgcaatttctgtcacttatcattttactcatgataaacctgggagcatgaatattttttcttttacagatatgacattcaaattggtattcaagatccctatgaagactgtgttgcaacaatgaggctgtacatgagaatgagatcacagcgtcataaagtggaagaatatccgcttgcttcagagccacaaaatagaaacaattttgcagcatggaggcaaagcgagcttgagaagatgtctccagaaaagatgttggatatctcaaggtctgattaccattgctggtgcttagactctagcagctaa

SEQ ID NO: 377 - protein, 325 aa, Olea europaea
MKISYHSVHQPQCGVCQKHCKSFASLREHSTGSLAKGNCSKISSERGCSLCMRIFDSPVSLCEHLEICCLPAPFPIDFVKMHWTESQIDTNDSGRIPEAIAMDCEMVGGGSDGSLDICARVCLVDEEEKPIFHTYVVPLIPVTNFRNEVTGITEENMRDAMPLKEVQDKILQILYNGESIGRLRLHGGKARVLVGHSLGHDLNCLRMNYPDHLLRDTAKYPPLMKTNLVSHSLKYLTKTYLGYDIQSGLHDPYEDCVSAMRLYKKMRSQCHPRKDMGMLLAAHNASTNTFDSWKPKELENMTPDELFNISKSNYKCWCLDSGPLS

SEQ ID NO: 378 - DNA, 978 bp, Olea europaea
  source 1..978: mol_type = other DNA
atgaaaatctcgtatcactcagttcaccagcctcaatgtggtgtgtgtcaaaagcattgcaaatcctttgcatcactaagggagcactcgactggttcactggctaaagggaattgttcaaagatatcctctgaaagaggttgcagcctctgtatgagaattttcgacagtccagtttctctctgtgaacacctggaaatctgttgcctacctgctcctttccccattgattttgtgaagatgcattggactgaatctcaaattgatactaatgacagtgggaggattcctgaagcaatcgctatggattgcgaaatggttggtggaggaagtgatgggtcactggatatatgtgctagggtgtgccttgttgatgaagaggaaaaaccgattttccatacttatgtagtaccgctaattcctgttaccaattttaggaacgaagttactggtattactgaggagaatatgagagatgctatgccactcaaggaagtgcaagataaaattttgcagattctctacaatggagagtcgattggaagattacggttacatggtggcaaagctagagttcttgtgggtcattcccttgggcacgatttaaattgcttgagaatgaattatcctgatcatctcctgagggatacagcaaaataccctcccttaatgaagacaaacctcgtcagccactcgctcaagtacctcaccaagacctatctcgggtacgatatccagtcggggttgcatgatccttacgaagattgtgtatcagcaatgaggttgtacaagaaaatgcggtcacaatgtcacccaagaaaagatatggggatgttattggctgctcataatgcatctaccaacacttttgattcttggaagcccaaagaacttgagaatatgacaccagatgaacttttcaatatctccaaatcaaattacaagtgttggtgtttggattcagggcctctttcgtga

SEQ ID NO: 379 - DNA, 2491 bp, Olea europaea
  source 1..2491: mol_type = other DNA
atgaaaatctcgtatcactcagttcaccagcctcaatgtggtgtgtgtcaaaagcattgcaaatcctttgcatcactaagggagcactcgactggtgatatacgatactacagtttggaaaatttatatgtcaaaggttgactcaggtgctcatacgtataatcattttttcaaacctttaggttcactggctaaagggaattgttcaaagatatcctctgaaagaggttgcagcctctgtatgagaattttcgacagtccagtttctctctgtgaacacctggaaatctgttgcctacctgctcctttccccattgtgagttgacctgggaaactttccctccttttaccttaaacacaaattgatagattcataagcttttttttttttcaggaaatattatggttgttggaaaatggactttgaatgttacaagcatgtgaacgtcaaaaattttgttttattatacaggattttgtgaagatgcattggactgaatctcaaattgatactaatgacagtgggaggattcctgaagcaatcgctatggattgcgaaatggttggtggaggaagtgatgggtcactggatatatgtgctagggtgtgccttgttgatgaagaggaaaaaccgattttccatacttatgtagtaccgctaattcctgttaccaattttaggtatctgggttatgcatatgatctatttattctttaagtttttaattaggttaataggcatgctcatcagttataattctatgtatattattgttttaggaacgaagttactggtattactgaggagaatatgagagatgctatgccactcaaggaagtgcaagataaaattttgcagattctctacaatggagagtcgattggaagattacggttacatggtggcaaagctagagttcttgtgggtcattcccttgggcacgatttaaattgcttgagaatgaattatcctgatcatctcctgaggtgaagtcattttggggcaattaaggttacaaatccattttcatgagattacattgcatccaacaacctgttcgaagaaattgatttattgtcttcaatgagaatggacttcttgtgtggaggctcgtggacaatacacagagctcattatattttggtttatggtgatttatgttctttaattccaaatcctactccctttcctttgtcccatctccaaaaaaagggaggaaatgagcaccagaaaatggggaggatcgatcttaaaaggctaacttattggtttataaattttaatgatttcatattttcttgaattaacttgactgagttctcgccagtggattgtaatatgaacttccatttctacctagtgtatctacgagctggtcattgtatactgattgtccttgaattttagcttctataatcaagagtaatgaaataagaaagatgtagatgaaattgttttgctgcgtactgcgttgcgcttaatttttcaccctctttatgtgcagggatacagcaaaataccctcccttaatgaagacaaacctcgtcagccactcgctcaagtacctcaccaagacctatctcgggtaagttgccatccagtgattattcttgggttccttttttgctaatttaagatacaatttaccaaaggaatagaagagctttggagctaaatggaagtaccagagaccaagtatataaaaacaacctgaacgactcttaggggtgggcgtggacatttacaagggatttttggcattccctctgaatagtccccggttttcgtgggcttcctattagttgctattcataagtatctgtcattccctctgaatagtcctcgatttttctttggcttcctttcagttactaatccataatctccaatttttttgtcatgaactctagaccaagtgaaaaatatattgaagttaataatgttctctgtgtaactgcaagaatggcagcttcagacaagcaatatttttacagtgaacttttctgaaaattgacagtctgtttctcatgatcattgatctgaattgagatttcagtaaaatggcccaacagttttgtggtcaaataggaaaaatggttttcatctttaagtgcaatctccatatactgctaaaatagtttagtagggtaactattctagtcgatttgcaattcctttaaatgttttgatcatgaatattgtaagtttggttgatgacatgggctttggtttaataggtacgatatccagtcggggttgcatgatccttacgaagattgtgtatcagcaatgaggttgtacaagaaaatgcggtcacaatgtcacccaagaaaagatatggggatgttattggctgctcataatgcatctaccaacacttttgattcttggaagcccaaagaacttgagaatatgacaccagatgaacttttcaatatctccaaatcaaattacaagtgttggtgtttggattcagggcctctttcgtga

SEQ ID NO: 380 - protein, 325 aa, Olea europaea
MKISYHSVHQPQCGVCQKHCKSFASLREHSTGSLAKGNCSKISSERGCSLCMRIFDSPVSLCEHLEICCLPAPFPIDFVKMHWTESQIDTNDSGRIPEAIAMDCEMVGGGSDGSLDICARVCLVDEEEKPIFHTYVVPLIPVTNFRNEVTGITEENMRDAMPLKEVQDKILQILYNGESIGRLRLHGGKARVLVGHSLGHDLNCLRMNYPDHLLRDTAKYPPLMKTNLVSHSLKYLTKTSLGYDIQSGLHDPYEDCVSAMRLYKKMRSQCHPRKDMGMLLAAHNASTNTFDSWKPKELENMTPDELFNISKSNYKCWCLDSGPLS

SEQ ID NO: 381 - DNA, 978 bp, Olea europaea
  source 1..978: mol_type = other DNA
atgaaaatctcgtatcactcagttcaccagcctcaatgtggtgtgtgtcaaaagcattgcaaatcctttgcatcactaagggagcactcgactggttcactggctaaagggaattgttcaaagatatcctctgaaagaggttgcagcctctgtatgagaattttcgacagtccagtttctctctgtgaacacctggaaatctgttgcctacctgctcctttccccattgattttgtgaagatgcattggactgaatctcaaattgatactaatgacagtgggaggattcctgaagcaatcgctatggattgcgaaatggttggtggaggaagtgatgggtcactggatatatgtgctagggtgtgccttgttgatgaagaggaaaaaccgattttccatacttatgtagtaccgctaattcctgttaccaattttaggaacgaagttactggtattactgaggagaatatgagagatgctatgccactcaaggaagtgcaagataaaattttgcagattctctacaatggagagtcgattggaagattacggttacatggtggcaaagctagagttcttgtgggtcattcccttgggcacgatttaaattgcttgagaatgaattatcctgatcatctcctgagggatacagcaaaataccctcccttaatgaagacaaacctcgtcagccactcgctcaagtacctcaccaagacctctcttgggtacgatatccagtcggggttgcatgatccttacgaagattgtgtatcagcaatgaggttgtacaagaaaatgcggtcacaatgtcacccaagaaaagatatggggatgttattggctgctcataatgcatctaccaacacttttgattcttggaagcccaaagaacttgagaatatgacaccagatgaacttttcaatatctccaaatcaaattacaagtgttggtgtttggattcagggcctctttcgtga

SEQ ID NO: 382 - DNA, 2492 bp, Olea europaea
  source 1..2492: mol_type = other DNA
atgaaaatctcgtatcactcagttcaccagcctcaatgtggtgtgtgtcaaaagcattgcaaatcctttgcatcactaagggagcactcgactggtgatatacgatactacagtttggaaaatttatatgtcaaaggttgactcaggtgctcatacgtataatcattttttcaaacctttaggttcactggctaaagggaattgttcaaagatatcctctgaaagaggttgcagcctctgtatgagaattttcgacagtccagtttctctctgtgaacacctggaaatctgttgcctacctgctcctttccccattgtgagttgacctgggaaactttccctccttttaccttaaacacaaattcatagattcataagctttttttttttttcaggaaatattatggttgttggaaaatggactttgaatgttacaagcatgtgaacgtcaaaagttttgttttattatacaggattttgtgaagatgcattggactgaatctcaaattgatactaatgacagtgggaggattcctgaagcaatcgctatggattgcgaaatggttggtggaggaagtgatgggtcactggatatatgtgctagggtgtgccttgttgatgaagaggaaaaaccgattttccatacttatgtagtaccgctaattcctgttaccaattttaggtatctgggttatgcatatgatctatttattctttaagtttttaattaggttaataggcatgctcatcagttataattctatgtatattattgttttaggaacgaagttactggtattactgaggagaatatgagagatgctatgccactcaaggaagtgcaagataaaattttgcagattctctacaatggagagtcgattggaagattacggttacatggtggcaaagctagagttcttgtgggtcattcccttgggcacgatttaaattgcttgagaatgaattatcctgatcatctcctgaggtgaagtcattttggggcaattaaggttacaaatccattttcatgagattacattgcatccaacaacctgttcgaagaaattgatttattgtcttcaatgagaatggacttcttgtgtggaggctcgtggacaatatacagagctcattatattttggtttatggtgatttatgttctttaattccaaatcctactccctttcctttgtcccatctccaaaaaaagggaggaaataagcaccagaaaatggggaggatcgatcttaaaaggctaacttattggtttataaattttaatgatttcatattttcttgaattaacttgactgagttctcgccagtggattgtaatatgaacttccatttctacctagtgtatctgcgagctggtcattgtatactgattgtccttgaattttagcttctataatcaagagtaatgaaataagaaagatgtagatgaaattgttttgctgcgtactccgttgcgcttaatttttcaccctctttatgtgcagggatacagcaaaataccctcccttaatgaagacaaacctcgtcagccactcgctcaagtacctcaccaagacctctcttgggtaagttgccatccagtgattattcttgggttccttttttgctaatttaagatacaatttaccaaaggaatagaagagctttggagctaaatggaagtaccagagactaagtatataaaaacaacctgaacgactcttaggggtgggcgtggacatttacaagggatttttggcattccctctgaatagtccccggttttcgtgggcttcctattagttgctattcataagtatctgtcattccctctgaatagtcctcgatttttctttggcttcctttcagttactaatccataatctccaatttttttgtcatgaactctagaccaagtgaaaaatatattgaagttaataatgttctctgtgtaactgcaagaatggcagcttcagacaagcaatatttttacagtgaacttttctgaaaattgacagtctgtttctcatgatcattgatctgaattgagatttcagtaagatggcccaacagttttgtggtcaaataggaaaaatggttttcatctttaagtgcaatctccatatactgctaaaatagtttagtagggtaactattctagtcgatttgcaattcctttaaatgttttgttcatgaatattgtaagtttggttgatgacatgggctttggtttaataggtacgatatccagtcggggttgcatgatccttacgaagattgtgtatcagcaatgaggttgtacaagaaaatgcggtcacaatgtcacccaagaaaagatatggggatgttattggctgctcataatgcatctaccaacacttttgattcttggaagcccaaagaacttgagaatatgacaccagatgaacttttcaatatctccaaatcaaattacaagtgttggtgtttggattcagggcctctttcgtga

SEQ ID NO: 383 - protein, 346 aa, Olea europaea
MESRNESSEISRNKCAACFRQFNKMEHLVEHMRISYHSVHEPMCGICKKHCRSYESLREHVIGPLPKQECKNIFSIRGCKFCLTILDSPNARRVHQERCQLSGGLLASFANLGLRDNLTIDNGYARGRQVVALACKMVGGGSDGSIDLCARVCLIDENENIIFHTYVKPPIPVTNYRYETTGIRPEYLRDATPLRQVQKKIQDFLCNGEPTWKIRPRGGKARILVGHDLDRLQLEYPAVMMRDTAKYPPLMKTSKLSNSLKYLTQAYLGYDIQTGMQDPYEDCVATMRLYIRMRSQNHTIEDYPLAFDPQNRNNFASWRQSELERMSPEEMFAISRSDYYCWCLDS

SEQ ID NO: 384 - DNA, 1382 bp, Populus trichocarpa
  source 1..1382: mol_type = other DNA
cgtcttaactagttttctactactcttgcagatttaacaactatttactttacgaggatcgcatggagtccagaaatgagtcgtccgagatttcaaggaacaagtgtgctgcatgctttagacaattcaacaaaatggaacacctagtggagcacatgagaatatcgtatcactcagtccatgaacccatgtgtggaatctgtaagaaacattgcagatcttatgagtccttgagggagcatgttatagggccattgcctaagcaagaatgtaagaatattttcagtatccgtggatgcaaattttgcttaaccatccttgatagccctaatgctcgcagagttcaccaagaaagatgccagctctccggtggactacttgcaagctttgctaatttaggccttcgggacaacctgacaatcgacaatggttatgcaagaggtcgacaggtagttgccctagcttgcaaaatggttggaggaggcagtgatggctccatagacctttgcgcaagggtttgcctgattgacgaaaatgaaaatattatcttccatacctatgtcaaaccaccaattcctgtcacaaactataggtatgaaaccacaggcattagaccagaatacctaagggatgcaacaccattaaggcaagttcaaaagaagattcaagacttcctttgtaatggagaaccgacgtggaaaattcgtcctagaggaggaaaagccaggattctcgtgggtcatgaccttgaccgtttgcaactagaatatccagctgtaatgatgagggatactgcaaaatatccgccactgatgaaaacaagcaagctcagcaactccttgaagtatctaacccaagcctatctcgggtatgacatccaaactggcatgcaagatccttatgaagattgtgttgctacaatgaggctctacataagaatgagatcacaaaatcatacgatagaggattaccctctcgcttttgatccacaaaaccgaaacaattttgcttcgtggaggcaaagtgagcttgaaaggatgagccccgaagaaatgtttgccatatcaagatctgattactactgctggtgcttggattcttaagcaagggacttttcccgactagtaagcaaaggcaactttgtgtccatgcgaaatgaacacacttccaaactattcgatattttatattaagaagaaaaataaattgggaagcttctgccattccattaccactcccctctagattactggaacgtactgaatatgttattcaatatgtaataagtagtttctttaatataaatttggtaatatatatttaataaaagtataacacataatggtaatttatgtgttaattactgcaatttctgtgtctaa

SEQ ID NO: 385 - DNA, 2103 bp, Populus trichocarpa
  source 1..2103: mol_type = other DNA
cgtcttaactagttttctactactcttgcagatttaacaactatttactttacgaggatcgcatggagtccagaaatgagtcgtccgagatttcaaggttctcactctcactctctcctctccacgcacatatacatggaaaccgacacgtacatggttttgattcaagctatatcatgcatgtcatattgtcaaattggtgaccttcatgtcaagctagcttttaattcctaaaccctagtttctagctagcgataaataacttgatgattatccttctgcaggaacaagtgtgctgcatgctttagacaattcaacaaaatggaacacctagtggagcacatgagaatatcgtatcactcagtccatgaacccatgtgtggaatctgtaagaaacattgcagatcttatgagtccttgagggagcatgttataggtaaatgtttgttttcttagcgtgtacaactcggagcacttggttttctcttcggtagcttaaaagtttgattttctcttacagggccattgcctaagcaagaatgtaagaatattttcagtatccgtggatgcaaattttgcttaaccatccttgatagccctaatgctcgcagagttcaccaagaaagatgccagctctccggtgtaaatgctgtattaatctttaatttaatacttcgaaaaaaaagataaactaaattaagttttgttttttcaaccgaattagttctaaactaaaagaatgcctcactagttcttttattgcacactccagggactacttgcaagctttgctaatttaggccttcgggacaacctgacaatcgacaatggttatgcaagaggtcgacaggtagttgccctagcttgcaaaatggttggaggaggcagtgatggctccatagacctttgcgcaagggtttgcctgattgacgaaaatgaaaatattatcttccatacctatgtcaaaccaccaattcctgtcacaaactataggtatatatgctataaatttatatactgcttctgcccgaaaatcaaacaatgcagtcgttaatagtgaattaaatattcttcaaatatttctaggtatgaaaccacaggcattagaccagaatacctaagggatgcaacaccattaaggcaagttcaaaagaagattcaagacttcctttgtaatggagaaccgacgtggaaaattcgtcctagaggaggaaaagccaggattctcgtgggtcatgaccttgaccgtttgcaactagaatatccagctgtaatgatgaggttaagtttttctccgaagcttagctatacaagtcatagcctcaaaaataattgccttgatctacttctaattatttatcagtttaaattataaaaattcgtcttttttaaaacaaaatataatgtgattaattaagaaggatggatttcattacagggatactgcaaaatatccgccactgatgaaaacaagcaagctcagcaactccttgaagtatctaacccaagcctatctcgggtaagcatatgcatcttctgctatatttgttttccttccgtgtctaagtatatgtttaatttacttgcaggtatgacatccaaactggcatgcaagatccttatgaagattgtgttgctacaatgaggctctacataagaatgagatcacaaaatcatacgatagaggattaccctctcgcttttgatccacaaaaccgaaacaattttgcttcgtggaggcaaagtgagcttgaaaggatgagccccgaagaaatgtttgccatatcaagatctgattactactgctggtgcttggattcttaagcaagggacttttcccgactagtaagcaaaggcaactttgtgtccatgcgaaatgaacacacttccaaactattcgatattttatattaagaagaaaaataaattgggaagcttctgccattccattaccactcccctctagattactggaacgtactgaatatgttattcaatatgtaataagtagtttctttaatataaatttggtaatatatatttaataaaagtataacacataatggtaatttatgtgttaattactgcaatttctgtgtctaa

SEQ ID NO: 386 - protein, 357 aa, Populus trichocarpa
MDAEADPPTRSRTERHKCFACYKQFKKKEHLVEHMKISYHTPHQPKCGVCQKHCKSFESLRNHLTGPLSRAGCSRTFSAQGCDLCLKLYDSPSSLGKHREICHLSAPASLGTKILPFAGSVDVKYTTKGAKAIAINCGLVGGGTDGSLDLCARVCLVDEDENIIFHTYVQPQSAVTDYRYEITGLTEEHLRNSKSHKEVQDRILEILYNGESARRLMSDSGKARLLVGHDLKRGLDCLRINYPGHLLRDTAKYRPLLKTNLVSHSLKYLTKTYLGYDIQTGEHDPYVDCVSVMRLYKRMRAQDHQGKGIGTPDSDSGFESQKAEELENMTPDELYQISKSDYKCWCLDSSIAAGLNS

SEQ ID NO: 387 - DNA, 1457 bp, Populus trichocarpa
  source 1..1457: mol_type = other DNA
gaagactagtttgatttttgcaacttcatcaaccagttaaacagtgaagaaatgcactccgatttgttcatctctttttcttttcttttttaaatatactaccatcaaaaacccatcctaaccccttctcctcctctgtctctgtgacgcccgatcctaagaagaatcgccatggatgctgaagctgacccaccaacaagatcgcgaaccgaaaggcacaagtgctttgcatgctacaagcaattcaagaaaaaagaacatcttgttgagcacatgaagatttcctaccacacacctcatcagcctaaatgtggggtctgccaaaagcactgcaaatcttttgaatctctgaggaatcaccttactggcccattatcaagggctggttgttcgaggactttctctgcccaaggttgtgatctctgcttgaaactctatgatagccccagttctcttggcaagcatagagaaatatgccacctatctgctcctgcttcccttggaacaaagatattgccttttgcaggatctgttgatgtaaagtacaccaccaaaggtgccaaagccattgctatcaactgtgggttggttggtggtggaaccgatggatcacttgacctttgcgcaagggtgtgtctggttgatgaagatgaaaatattattttccatacatatgttcaacctcaaagtgctgttaccgattacagatacgaaataactggattaactgaagagcatctaagaaattcgaagtctcataaggaagtacaagacagaattctggaaattttgtacaatggagaatctgctaggagactaatgtcagacagtggaaaggctagactgcttgtgggtcatgacttgaagcgtggtttggattgcttgaggataaactatcctggtcatttgctgagggatactgcaaaataccgaccattgttgaaaactaacctggttagccactcgctcaagtacctcaccaaaacatatcttgggtatgatatccagacaggggaacatgatccatacgtagattgtgtttctgttatgagactgtacaagagaatgcgtgctcaagatcatcaaggtaaaggaattggaactccagattcagacagcggttttgagtcccagaaagcagaggaactcgagaacatgaccccagatgagctataccagatctcaaagtcagactacaaatgttggtgtctagattcaagtatagcagcagggcttaacagttgatttttagtttctcatctttgatctttgtgcactcggcgggacaatattttgctgctcaaagaaataggaatgacgtgatgtgctgctaggtatgaaggattcgtgtacagtttttgctgtaatgcaaagtgaagcatatattcgcgtagttgtttatatatgtttgtttacatttcttgaactctaaagcaaacgggagagtttctaatatt

SEQ ID NO: 388 - DNA, 3357 bp, Populus trichocarpa
  source 1..3357: mol_type = other DNA
gaagactagtttgatttttgcaacttcatcaaccagttaaacagtgaagaaatgcactccgatttgttcatctctttttcttttcttttttaaatatactaccatcaaaaacccatcctaaccccttctcctcctctgtctctgtgacgcccgatcctaagaagaatcgccatggatgctgaagctgacccaccaacaagatcgcgaaccgaaaggtctctctcgctccctctttctcgctgtattctgcattttttttttttattctcgctttcatatgtgtcaataatttgttcttacaattcgtttctttttcttgataatgaattcgggctgtcttcttcagaaactccaagtccatgccatgtatatgaaattgtttaattcctcgtgttgtttcatggaagcaggcacaagtgctttgcatgctacaagcaattcaagaaaaaagaacatcttgttgagcacatgaagatttcctaccacacacctcatcagcctaaatgtggggtctgccaaaagcactgcaaatcttttgaatctctgaggaatcaccttactggtatcattctattccatgttctgattgctttatctgttaaagtttactgctttttttttcatgttttcctccaattatttaggcccattatcaagggctggttgttcgaggactttctctgcccaaggttgtgatctctgcttgaaactctatgatagccccagttctcttggcaagcatagagaaatatgccacctatctgctcctgcttcccttgtaagttgttgattcgtaaattcttatgcaaaaatggtaacttgtctatcttttagtgcttttcattttatttattgtacattttaaatgattaattactaaaagtcatgtcacccatttccttttttttttcacagggaacaaagatattgccttttgcaggatctgttgatgtaaagtacaccaccaaaggtgccaaagccattgctatcaactgtgggttggttggtggtggaaccgatggatcacttgacctttgcgcaagggtgtgtctggttgatgaagatgaaaatattattttccatacatatgttcaacctcaaagtgctgttaccgattacaggtacttctgtgttgacacaatccttggttttatttaaagaacaatgagggggaggggagggggaatatatttacaaaagtctttttttttttaattgaaacttatacacatgttttcagatacgaaataactggattaactgaagagcatctaagaaattcgaagtctcataaggaagtacaagacagaattctggaaattttgtacaatggagaatctgctaggagactaatgtcagacagtggaaaggctagactgcttgtgggtcatgacttgaagcgtggtttggattgcttgaggataaactatcctggtcatttgctgaggtagattaaactcttctgatggttgaaattggaatttgggatggaacattacagtttgtaataatacttatgattcaggcttgaaaaacattactgagccgcaccactgctttacaaatctgacctttgaataattgaataataccactaatccgccatgtagtctacttctaggtgaagcaaatcctaaaatactactaattgctgatggaagaatgacacttggtggtcattttgacgtgtcttggaataaaccaacaaattttcatattattgaataggagctttttgctgcacattgagtactgataataattgaaggtttggtaagctttcttgtgactttactgttgttttgcaacattctagcttttcatgggatgtatccaaacacattctaaatgaacataagaccagatagtggtgaggtttacctcgtcttaaactcccttccccatgctaggagtgccgtagtatatcttcaactgctggcaaatcttgtcttggcatccatattaggagtgaccccccctacaggccaagacagaaccttggggactggcccaaattatggtaggtaattgagaaaacaattcaaatagttttttttttttcttgttctggagatcctgtaatttgaaatgtaatatttgagttatccatcacaaatgttgtgtgcatgttctccttgttctcatctttccttcttttatagttacaatgcactttgattttgatttgagcagggatactgcaaaataccgaccattgttgaaaactaacctggttagccactcgctcaagtacctcaccaaaacatatcttgggcaagttgctctttcttttcttgtttctttcgtgatgtcttaatagtgattggatcttccctcctgcatgtacgatggctgaatccttatatggctaactattttaattagtaaccaatacttgaactagaaatgatgcttttgtgttatctgtcttttttttttttttccaagtaaaatgcaactcagatgtaattaaaaattatgcaaatcaattcccaagttaaaagattttttttttttgaaaattttataacacttggatttacaatgctcgaacgctgtatttctgtaaacatagttggtaactatttcttcctcaattcttagcagaaaagactggaatttctcatcatgttcgtcaaagaggatttgggaaagatgatatcttctttgtgcctaatatgttggttttccagaactcagatactactttcagcaaacactgttttgaaagtcattattggttcacaaataagaggtcattgtggagagtttaacgaacatttaaccttttgttgatctgtttttctagtttttggaatgatcaccgtgcacttcatatttatgggcagtatttgctagttgaaattactctctctgaagttttttgcctcacaggtatgatatccagacaggggaacatgatccatacgtagattgtgtttctgttatgagactgtacaagagaatgcgtgctcaagatcatcaaggtaaaggaattggaactccagattcagacagcggttttgagtcccagaaagcagaggaactcgagaacatgaccccagatgagctataccagatctcaaagtcagactacaaatgttggtgtctagattcaagtatagcagcagggcttaacagttgatttttagtttctcatctttgatctttgtgcactcggcgggacaatattttgctgctcaaagaaataggaatgacgtgatgtgctgctaggtatgaaggattcgtgtacagtttttgctgtaatgcaaagtgaagcatatattcgcgtagttgtttatatatgtttgtttacatttcttgaactctaaagcaaacgggagagtttctaatatt

SEQ ID NO: 389 - protein, 350 aa, Populus trichocarpa
MDPSETLRNKCAACYRQFNRFEHLVEHMRTSYHSVHEPMCGICGKRCRSFESLREHLIGPLPKAECERVFRDRGCDICLTILTSRYALRAHRDACQLSCGNNGLLHRFANMGIQDDLRIDSGKSRAVALACKMVGGGSDGSLDLCAKICIIDEYENTIFRSYVKPQLPVTNYRYETTGIRPEYLRDAMPLRQVQRKIQDFLCNGEPIWKIRPRGGKARILVGHGLDHYLRCLEFDYPSLKIRDTATYPPLMKTSKLSNSLKYLTKAYLGYDIQVGIQDPYEDCVATMRLYRRMRSQAHRNENHPLASDPQNKNNFASWRQGELERMSPNDLLAISRSDYYCWCLDNKDYI

SEQ ID NO: 390 - DNA, 1053 bp, Taraxacum kok-saghyz
  source 1..1053: mol_type = other DNA
atggatccttcagaaactctaaggaacaagtgtgcagcctgctatcggcaattcaacagatttgagcacctagtggaacacatgagaacttcatatcactcggttcatgaacccatgtgtggaatttgtggaaaacgatgccgatcgtttgaatctcttcgtgagcatcttatagggccattgccaaaggcagaatgtgaaagggtgttccgcgaccgtggatgtgacatttgcttaaccatccttaccagccgttatgctctcagggctcaccgtgatgcatgccaactctcttgtggcaataacggtttattacaccgatttgctaacatggggatacaagatgatttaagaatcgatagcggcaaatcaagagcagttgcacttgcgtgcaaaatggtcggtggtggtagtgatggttcattggatctttgtgcaaaaatttgcatcattgatgaatatgaaaacacaatatttcgttcatatgtcaaaccgcagcttcctgttacaaattacaggtatgagacaacaggcattcggccagaataccttcgggacgcaatgccacttaggcaggttcaaagaaagattcaagattttctatgcaatggtgaacccatttggaagatccgcccaagaggtgggaaggcaaggattcttgtaggtcatggtttggatcattatcttagatgcttggaattcgattacccttcacttaaaattagggatacagcaacctatccgccattaatgaagactagcaagctcagcaattcattgaagtatctcacaaaagcataccttggatatgatattcaagttgggatacaagatccttatgaagactgtgttgcaacaatgagactttacaggaggatgagatcacaggctcatagaaacgagaaccatccgcttgcttcagatccacaaaataagaataattttgcttcatggagacaaggtgagcttgagagaatgagtcctaatgatctgctggcaatctcgaggtctgactattattgttggtgcttggataataaagattatatttaa

SEQ ID NO: 391 - DNA, 4765 bp, Taraxacum kok-saghyz
  source 1..4765: mol_type = other DNA
accaaatactcttttcaagaccattaattcccgttacaacaaatcatctaatttctagaattagcaagtttattgacgcacggaagcaagaataaatgaataatacttccaaaaaggggacagttttattcaaatccaggatgcccaaggcttaaaggtgccctatatataaggtggggctaaagttggcacaaatttggaaaatttaaatttaatcctattaacttcatacaaataaccagctaattaaataaacaagagaagaaaaataaaagaaattccaagaaattgtatattttgtcatcaacatagaatcaaccaaattatcgaaatgagttgcagtttgcgaaaactacaaattggagaccaaaatgtcagccgatgtgagtgtggatcttctattcaaggggtcagtcaaaaagttcacatgtgcttctttcctagcggaaacccgggcacgcctacatacgtccagggacaattttatgtagtgtgaaggtgggtcctagaaattttcaaatttcttataatttataaagaaattttttgaggaactaacttaaaaataacttatgacctaccttatcttcaaaaatcatagtatttgtatagaaaattatatttagaaagttttggtaaccatttggttttcatttctagattctcccctgcatacgtcaaaaagaacgtttaaccatatcatgcatggcggtacttgaagacctggagctctttacagtgagtcgcatgttcctcaaaagtgtccaaacatgtcttgcgacaaactggacatgcattaccaaccggaataatagaatcatgaggggatacttgatgataatacgatatttcattggtgatatatgttgacctaaaccctttatagggatagccagtagttaaattaaatatagaaagcaacatatgagtgtttataaaaatcaagattttatgtttttgcatgggtatctcacagagggccgggaaggaaccaattgacaataaataaaaggaataaagtaatagaaatagtaatgagagaggacaattattctctacgatgtggagtaggaccatgcatgggtttatcaagcatgttcatttgttcttggaatatgcagtcaaccattcaagagactagagatagagacttccccacgtgagcactaacgcaaaaagtacttaattaaggaatcattcaagagaattctcaggttgtactatcaactacttttaactttctaagttctaaccccgactatgttttaccagcatgtacttcaggcttactacgtactcaccatcactgcatgaaaagttaataggatcgatccattttatatatgaaaatagaaatatatatatatacctttaatttccaggtctactgatgttataaatacattcaacattcttccctttcctcctcaaaccctctcaacatttcttctcctacaactacaagctaagaaacaactactactattattttattccaaaatggatccttcagaaactctaaggtaacaaccataaatcaatatttctgcatgcttatatatatatatatatatatatatatatatatatatatatatatatatatatatatatatatatatatatatatatatatatatatatatatatatatatatatatataatcaacaacatttatattcaaatatataacatcctaaacttaatttaccatgcattaatattttgtccaggaacaagtgtgcagcctgctatcggcaattcaacagatttgagcacctagtggaacacatgagaacttcatatcactcggttcatgaacccatgtgtggaatttgtggaaaacgatgccgatcgtttgaatctcttcgtgagcatcttataggtatatatatattaattacatgatgtatattcaattactcattagagtaattgatcaatcagttaacgttcttaattgatataactacaagatattaaattcttaattaattcacagggccattgccaaaggcagaatgtgaaagggtgttccgcgaccgtggatgtgacatttgcttaaccatccttaccagccgttatgctctcagggctcaccgtgatgcatgccaactctcttgtggcaataacgtaaatcctcgatcttttaaaaaaactatctattttctcgatatattgcgagtgtacatgtgttttaattaagaattattttggctatgattacttaaattcagggtttattacaccgatttgctaacatggggatacaagatgatttaagaatcgatagcggcaaatcaagagcagttgcacttgcgtgcaaaatggtcggtggtggtagtgatggttcattggatctttgtgcaaaaatttgcatcattgatgaatatgaaaacacaatatttcgttcatatgtcaaaccgcagcttcctgttacaaattacaggtaaagatcttctttcaccttcttaatttccccatttgtttaatccccacatatataatcttttataattaataaaaatgttgtgacatttaattcataggtatgagacaacaggcattcggccagaataccttcgggacgcaatgccacttaggcaggttcaaagaaagattcaagattttctatgcaatggtgaacccatttggaagatccgcccaagaggtgggaaggcaaggattcttgtaggtcatggtttggatcattatcttagatgcttggaattcgattacccttcacttaaaattaggcaagcaatcacaccttctaaatttcaacatactttctcaagttatcgacatatccaatttgacgttaatttgtatatatgcgctaattttgtcacagggatacagcaacctatccgccattaatgaagactagcaagctcagcaattcattgaagtatctcacaaaagcataccttgggtaatctttgataccttaaacatttaattaaggattcgaagtaaaattaattttaatttctgtattttgttatttacgtagatatgatattcaagttgggatacaagatccttatgaagactgtgttgcaacaatgagactttacaggaggatgagatcacaggctcatagaaacgagaaccatccgcttgcttcagatccacaaaataagaataattttgcttcatggagacaaggtgagcttgagagaatgagtcctaatgatctgctggcaatctcgaggtctgactattattgttggtgcttggataataaagattatatttaaacaaagggaaggattgatcgaatcaagatttaatagctaaattgaacaaataattaagtttacaaaaactattagttatgagtatgaataggaataaggcatggaaatttgtccatgatttgtagtagatgagataatgcatactacgtacgattttatgagacgcgtgtctgtacgaattaatatttctgttagaatatgaataaatatgtgttgtaataatctttgtaaagaaacgtctgttatttgagattgagaattagtacacacttgaaacgcatacatagtaatgcaagaaattccatgaagacatcaattaatagtaacgtacacaactatcatgccctttaatatttccataaagaccatgaaaaacaattagaactgaaatgagaaggaaccacctgaagtgaataatcgaagaatcacaatgggaaaatggactttcgttagaattcatgacttacgatcaatgtgacgtgggatatggtggaaagatcgagtctcagaacatttatctcacgtacaaacttaaagctatgttctattaattcaagaggtaattagtttaaaatgttaaaaacataaaattgcttttgagacctattataattacttctgtgatcggttctaaaatccataaaaaaaacattgtgattcattctggaattggttttaacttttaacattacaacatccgttggttttggtttcaagagtcgttgaacactcattattaacaaaaaaatatggcaaatgataaataattgtcttaaaccacattgatgcaattaagagatatagagtggtctcatactgttgggaaaaataaactgtgtattattctctttaatcatttatgtacttttgtcttagataaggaccgttttttaattttattattctggacaattttttaaattttgtcttacagaggactaattttgtattctcttttacacatcaccgtttctataaaattgttttaaattttttttttccggcaacaacaagctaaaactccattaaaacccagtaaaagacactgggagaacaaagagattacaggttataaaaaggatttgacatccacaagttcaaatccggtaattttaagttactcctattgaacaaccaataataagcaaactcctgagatctccttaagcaaaactctttctccactcttttattgttaaaaataatatcatttctatgaatccatgtagatttgagcaaagccaccaccagcaccttgaccattttgattctcgacggggctcggaaaacacaatcaatccaagcaaagcaatcccttagagtttcaaaagaaggaatagagcagttgaccaacaagccgagtctcgcccataaccaggttacgaaatcacattagaagaacacgtgactagtatcctccgcttgatcaccacaaatctcacaatttgagcttgggacatcgaagcccatctccactagatttttttcgaaccgcaattc

SEQ ID NO: 392 - protein, 350 aa, Taraxacum kok-saghyz
MDPSETLRNKCAACYRQFNRFEHLVEHMRTSYHSVHEPMCGNCGKRCRSFESLREHLIGPLPKAECERVFRDRGCDICLTILTSRYALRAHRDACQLSCGNNGLLHRFANMGIQDDLRSDSGKSRAVALACKMVGGGSDGSLDLCAKICIIDEYENTIFRSYVKPQLPVTNYRYETTGIRPEYLRDAMPLRQVQRKIQDFLCNGEPIWKIRPRGGKARILVGHGLDHYLRCLEFDYPSLKMRDTATYPPLMKTSKLSNSLKYLTKAYLGYDIQVGIQDPYEDCVATMRLYRRMRSQAHRNENYPLASDPQNKNNFASWRQGELERMSPDDLLAISRSDYYCWCLDNKDYI

SEQ ID NO: 393 - DNA, 1053 bp, Taraxacum kok-saghyz
  source 1..1053: mol_type = other DNA
atggatccttcagaaactctaaggaacaagtgtgcagcctgctatcggcagttcaacagatttgagcacctagtggaacacatgaggacttcatatcactcggttcatgaacccatgtgtggaaattgtggaaaacgatgccgatcctttgaatctcttcgtgagcatcttatagggccattgccaaaggcagaatgtgaaagggtgttccgtgaccgtggatgtgacatttgcttaaccatccttaccagccgctatgctctcagggctcaccgtgatgcatgccaactctcttgtggcaataacggtttattacaccgatttgctaacatggggatacaagatgatttacgaagcgatagcgggaaatcaagagcagttgcacttgcgtgcaaaatggtcggtggtggtagtgatggttcattggatctttgtgcaaaaatttgcatcattgatgaatatgaaaacacaatatttcgttcctatgtcaaaccgcagcttcctgttacaaattacaggtatgagaccacaggcattcggccagaatacctccgggacgcaatgccacttaggcaggttcaaagaaagattcaagatttcttatgcaatggtgaacccatttggaagatccgcccaagaggtgggaaggcaaggattcttgtaggtcatggtttggatcattatcttagatgcttggaattcgattacccttcacttaaaatgagggatacagcaacctatccgccattaatgaagactagcaagctcagcaattcattaaagtatctcacaaaagcataccttggatatgatattcaagttgggatacaagatccttatgaagactgtgtcgcaacaatgagactttacaggaggatgcgatcacaggctcatagaaacgagaactatccacttgcttcagatccacaaaataagaacaattttgcttcatggagacaaggtgagcttgagaggatgagtcctgatgatctgctggcaatttcgaggtctgattactactgttggtgcttggataataaagattatatttaa

SEQ ID NO: 394 - DNA, 4040 bp, Taraxacum kok-saghyz
  source 1..4040: mol_type = other DNA
aaccccggcacgcctacatacgtcaaaaagaacatccctaaccatatcatggcggtacttgaagaccaggtactctttacagtgaaccgcatgttccccaaaagtgtccaaacatgtcttgcgacaaactggacatgcgtcaccaaccagaaataatggaatcatgaggcgatacttaatgatagtacgatattctactggtgatatatgttgacctaaaccctttacaataaattaaatatatagaaagcagcatatgagtgtttataaaaatcaagactttatgtttttgcatgggtgtatctcacagagggacgggaaggaaccaaattgacagtaaataaaaggaataaagtaatagaaatagtaatgcgagaggacaaatattctctacgatgtggagtaggaccatgcatgggtttatcaagcatgttcatttgttctttgaatatgcagtcaaccattcaagagactagagatagagacttccccacgtgaacactaacgcaaaaagttcttaaggaatcattcaagagaattctcaggttgtactatcaaccacctctaagttctaaccccgactatgttttaccagcatgtacttcaggcttactacgtactcaccatcactgcgtgaaaagttacttggatccattttatatatacctttaatttccaggtctactgatgttataaataccatcaacattcttccatttcctcctcaaactctctcaacatttcttctcccacaactacaagaaaccactatcattttatttcaaaatggatccttcagaaactctaaggtaacgaccataaatcaatatttctgcatgcttattatatatatcaaagatgacatgccacttgcattccatgataatatatataattattaattaacagcatcacttgtgatcagtctgcatttatattcaaatatataacatcccgtaacttatatcttaccatgcattgatattttgtccaggaacaagtgtgcagcctgctatcggcagttcaacagatttgagcacctagtggaacacatgaggacttcatatcactcggttcatgaacccatgtgtggaaattgtggaaaacgatgccgatcctttgaatctcttcgtgagcatcttataggtatatatattaattacataatgtatatatcaattactcatttgagtaaatcaatcaactaacgctttgatataattaattacatgatgttaatttcttaattaattcacagggccattgccaaaggcagaatgtgaaagggtgttccgtgaccgtggatgtgacatttgcttaaccatccttaccagccgctatgctctcagggctcaccgtgatgcatgccaactctcttgtggcaataacgtaaatcctcgatctttaattaaacaaaactatctattttctcgatatgtgtaagtgtacgtacatgtgttttaatcaagaattattttggatatgattacttcaattcagggtttattacaccgatttgctaacatggggatacaagatgatttacgaagcgatagcgggaaatcaagagcagttgcacttgcgtgcaaaatggtcggtggtggtagtgatggttcattggatctttgtgcaaaaatttgcatcattgatgaatatgaaaacacaatatttcgttcctatgtcaaaccgcagcttcctgttacaaattacaggtacagatcttctttcaccttcttaattgccccatttgtttaatcgatatccccatatatataatcttttataattaatacaatagttgtgacatttaattaattcataggtatgagaccacaggcattcggccagaatacctccgggacgcaatgccacttaggcaggttcaaagaaagattcaagatttcttatgcaatggtgaacccatttggaagatccgcccaagaggtgggaaggcaaggattcttgtaggtcatggtttggatcattatcttagatgcttggaattcgattacccttcacttaaaatgaggcaagcaatcacactttctaaattataacacactttctcaagttatcgacatatccaatttgacgttaatttgtatatctgcgctaattttatcacagggatacagcaacctatccgccattaatgaagactagcaagctcagcaattcattaaagtatctcacaaaagcataccttgggtaattaatcttttataccttaaacattaatttaagaattcgaggtaaaattaattttaatttgtgtattttcttatttacatagatatgatattcaagttgggatacaagatccttatgaagactgtgtcgcaacaatgagactttacaggaggatgcgatcacaggctcatagaaacgagaactatccacttgcttcagatccacaaaataagaacaattttgcttcatggagacaaggtgagcttgagaggatgagtcctgatgatctgctggcaatttcgaggtctgattactactgttggtgcttggataataaagattatatttaaacaaagggaaggattggtcaaatcaagatttgatagctaaagtgaacaaataatattaagtttgcaaaaattaatagttatgagtatgaataggaataaggcatggaaatttgtccatgatttgtagtggatgagataatgcatagtacgattttatgagacgcgtgtctttacgaattaatatttcagttagaatatgaataaatatgtgttgtaataatctttgtaaagaaacgtctgttatttgagattgagaattagtacgcgtacatagtgatgcaagaaattccttgaaggcatcaattaatagtaacacaactatcatggcctttaatatttccataaggaccatgaaaaacaattagaactgaaatgagaaggaaccacctgaagtgaataatcgaaaaatcacaatgggaaaatggagtttcgttagaattcatgacttacgatcaatgtgacgtgggatatggtggaaagatcgagtctcagaacatttatctcacgctacaaacttaaagctatgttctattaattcaagagggactaattagtttaaaatgttaaaaacatagaattgttatatattgagacctattataattacttctgtgatcggttctaaaatccataataaaaacattgtgattcattctggaattggttttaactttaaacattacaacatccgttggttttggtttcaagagtcgttgaacactcattattaacaaaaaaaatatggcaaatgataaataattgtcttaaaccacattgatgcaattaagagatatagagtggtctcatattgttgggaaaaataaactgtgtattattctctttgatcattatgtacttttgtcttagataaggaccgtttttaaattttattattctggacagtttttaaaagtttgtcttatagaggactaatattgtattctcttttacacatcaccgtttctataaaaataaggaccaattttgtaatttctcacatacgaaccaattttctcattttgtctacatgaaattatagagaccaaaaattcaatttactgagacaaatatattctaacattgatttgaccttaagaacaattactaacaatgtatataatataatgttgacttagccatttcctaaatttgttattcaatagatcctctagttattcagttattcttttatgtattattcggattaaacagataaccatattacatggcattgttggtttggcatcacttgtcgcttcaaaagccacttagtttttttttttaaactaaaattcgttcttactcattcgaaagaaacgatattatttgttattgatctgtaaacaaaaccaagttttgtaatgaacctttcgtttctgaccactagcgtccatctctcaaccaccaaagaataagaatcttgaaagtaaaaataaaaacctggaaactaaaaataaaaaggtagaaactaagaataaaaatctaatatcatattctttt

SEQ ID NO: 395 - protein, 350 aa, Taraxacum kok-saghyz
MGPSETLRNKCAACYRQFNRFEHLVEHMRTSYHSVHEPMCGICGKRCRSFESLREHLIGPLPKAECERVFRDRGCDICLTILTSRYALRAHRDACQLSCGNNGLLHRFANMGIQDDLRIDSGKSRAVALACKMVGGGSDGSLDLCAKICIIDEYENTIFRSYVKPQLPVTNYRYETTGIRPEYLRDAMPLRQVQRKIQDFLCNGEPIWKIHPRGGKARILVGHGLDHYLRCLEFDYPSLKIRDTATYPPLMKTSKLSNSLKYLTKAYLGYDIQVGIQDPYEDCVATMRLYRRMRSQAHRNENHPLASDPQNKNNFASWRQGELERMSPNDLLAISRSDYYCWCLDNKDYI

SEQ ID NO: 396 - DNA, 1053 bp, Taraxacum kok-saghyz
  source 1..1053: mol_type = other DNA
atgggtccttcagaaactctaaggaacaagtgtgcagcctgctatcgtcaattcaacagatttgagcacctagtggaacacatgagaacttcatatcactcggttcatgaacccatgtgtggaatttgtggaaaacgatgccgatcgtttgaatctcttcgtgagcatcttatagggccattgccaaaggcagaatgtgaaagggtgttccgcgaccgtggatgtgacatttgcttaaccatccttaccagccgttatgctctcagggctcaccgtgatgcatgccaactctcttgtggcaataacggtttattacaccgatttgctaacatggggatacaagatgatttaagaatcgatagcggcaaatcaagagcagttgcacttgcgtgcaaaatggtcggtggtggtagtgatggttcattggatctttgtgcaaaaatttgcatcattgatgaatatgaaaacacaatatttcgttcatatgtcaaaccgcagcttcctgttacaaattacaggtatgagacaacaggcattcggccagaataccttcgggacgcaatgccacttaggcaggttcaaagaaagattcaagattttctatgcaatggtgaacccatttggaagatccacccaagaggtgggaaggcaaggattcttgtaggtcatggtttggatcattatcttagatgcttggaattcgattacccttcacttaaaatcagggatacagcaacctatccgccattaatgaagactagcaagctcagcaattcattgaagtatctcacaaaagcataccttggatatgatattcaagttgggatacaagatccttatgaagactgtgttgcaacaatgagactttacaggaggatgagatcacaggctcatagaaacgagaaccatccgcttgcttcagatccacaaaataagaataattttgcttcatggagacaaggtgagcttgagagaatgagtcctaatgatctgctggcaatctcgaggtctgactattattgttggtgcttggataataaagattatatttaa

SEQ ID NO: 397 - DNA, 4751 bp, Taraxacum kok-saghyz
  source 1..4751: mol_type = other DNA
tcccgttacaacaaatcatctaatttctagaattagcaagtttattgacgcacggaagcaagaataaatgaataataattccaaaaaggggacagttttattcaaatccaggatgcccaaggcttaaaggtgccctatatataaggtggggctaaagttggcacaaatttggaaaatttaaatttaatcctattaacttcatacaaataaccagctaattaaataaacaagagaagaaaaataaaaaaaattccaagaaattgtatattttgtcatcaacatagaatcaaccaaattatcgaaatgagttgcagtttgcgaaaactacaaattggagaccaaaacgtcagccgatgtgagtgtggatcttctattcaaggggtcagtcaaaaagttcacatgtgcttctttcctagcggaaacccgggcacgcctacatacgtccagggacaattttatttagtgtgaaggtgggtcctagaaattttcaaatttcttataatttataaagaaatttttttgaggaactaacttaaaaataacttaggacctaccttatctttaaaaatcatagtatttgtatagaaaattatatttagaaaattttggtaaccatgtggttttcatttctagattctcccctgcatacgtcaaaaagaacgtctctaaccatatcatgcatggcggtacttgaagaccaggagctctttacagtgagtcgcatgttcctcaaaagtgtccaaacatgtcttgcgacaaactggacatgcattaccaaccggaataatagaatcatgaggagatacttgatgataatacgatatttcattggtgatatatgctgacctaaaccctttatagggatagccagtagttaaattaaatatagaaagcaacatatgagtgtttataaaaatcaagattttatgtttttgcatgggtatctcacagagggccgggaaggaaccaattgacaataaataaaaggaataaagtaatagaaatagtaatgagagaggacaattattctctacgatgtggagtaggaccatgcatgggtttatcaagcatgttcatttgttcttggaatatgcagtcaaccattcaagagactagagatagagacttccccacgtgagcactaacgcaaaaagtacttaaggaatcattcaagagaattctcaggttgtactatcaactacttttaactttctaagttctaaccccgactatgttttaccagcatgtacttcaggcttactacgtactcaccatcactgcatgaaaagttaataggatcgatccattttatatatgaaaatagaaatatatatatacctttaatttccaggtctactgatgttataaataccttcaacattcttccctttcctcctcaaaccctctcaacattttccctttcctcctcaaaccctctcaacatttcttctcctacaactacaagctaagaaacaactactactattattttattccaaaatgggtccttcagaaactctaaggtaacagccataaatcaatatttctgcatgcttttatatatatatatatatatatatatatatatatatatatatatatatatatatatatatatatatatatatatatatatatatatatatataatcaacaacatttaaattcaaatatataacatcctaaacttatatcttaccatgcattaatattttgtccaggaacaagtgtgcagcctgctatcgtcaattcaacagatttgagcacctagtggaacacatgagaacttcatatcactcggttcatgaacccatgtgtggaatttgtggaaaacgatgccgatcgtttgaatctcttcgtgagcatcttataggtatatatatattaattacataatgtatattcaattactcattagagtaattgatcaatcaattaacgttcttaattgatataactacaagatactaagttcttaattaattcacagggccattgccaaaggcagaatgtgaaagggtgttccgcgaccgtggatgtgacatttgcttaaccatccttaccagccgttatgctctcagggctcaccgtgatgcatgccaactctcttgtggcaataacgtaaatcctcgatcttttaaaaaaactatctattttctcgatatattgcgagtgtacatgtgttttaattaagaattattttggctatgattacttaaattcagggtttattacaccgatttgctaacatggggatacaagatgatttaagaatcgatagcggcaaatcaagagcagttgcacttgcgtgcaaaatggtcggtggtggtagtgatggttcattggatctttgtgcaaaaatttgcatcattgatgaatatgaaaacacaatatttcgttcatatgtcaaaccgcagcttcctgttacaaattacaggtaaagatcttctttcaccttcttaatttccccatttgtttaatccccacatatataatcttttataattaataaaaatgttgtgacatttaattcataggtatgagacaacaggcattcggccagaataccttcgggacgcaatgccacttaggcaggttcaaagaaagattcaagattttctatgcaatggtgaacccatttggaagatccacccaagaggtgggaaggcaaggattcttgtaggtcatggtttggatcattatcttagatgcttggaattcgattacccttcacttaaaatcaggcaagcaatcacaccttctaaatttcaacatactttctcaagttatcgacatatccaatttgacgttaatttgtatatctgcgctaattttatcacagggatacagcaacctatccgccattaatgaagactagcaagctcagcaattcattgaagtatctcacaaaagcataccttgggtaatctttgataccttaaacatttaattaaggattcgaagtaaaattaattttaatttctgtattttgttatttacgtagatatgatattcaagttgggatacaagatccttatgaagactgtgttgcaacaatgagactttacaggaggatgagatcacaggctcatagaaacgagaaccatccgcttgcttcagatccacaaaataagaataattttgcttcatggagacaaggtgagcttgagagaatgagtcctaatgatctgctggcaatctcgaggtctgactattattgttggtgcttggataataaagattatatttaaacaaagggaaggattgatcgaatcaagatttaatagctaaattgaacaaataattaagtttacaaaaactattagttatgagtatgaataggaataaggcatggaaatttgtccatgatttgtagtagatgagataatgcatactacgtacgattttatgagacgcgtgtctgtacgaattaatatttctgttagaatatgaataaatatgtgttgtaataatctttgtaaagaaacgtctgttatttgagattgagaattagtacacacttgaaacgcatacatagtaatgcaagaaattccatgaaggcatcaattaatagtaacgtacacaactatcatgccctttaatatttccataaagaccatgaaaaacaattagaactgaaatgagaaggaaccacctgaagtgaataatcgaagaatcacaatgggaaaatggactttcgttagaattcatgacttacgatcaatgtgacgtgggatatggtggaaagatcgagtctcagaacatttatctcacgtacaaacttaaagctatgttctattaattcaagaggtaattagtttaaaatgttaaaaacataaaattgctattgagacctattataattacttctgtgatcggttctaaaatccataaaaaaacattgtgattcattctggaattggttttaacttttaacattacaacatccgttggttttggtttcaagagtcgttgaacactcattattaacaaaaaatatggcaaatgataaataattgtcttaaaccacattgatgcaattaagagatatagagtggtctcatactgttgggaaaaataaactgtgtattattctctttaatcatttatgtacttttgtcttagataaggaccgttttttaattttattattctggacaattttttaaattttgtcttacagaggactaattttgtattctcttttacacatcaccgtttctataaaattgttttaaatttttttttccggcaacaacaagctaaaactccattaaaacccagtaaaagacactaggagaacaaagagattacaggttataaaaaggatttgacatccacaagttcaaatccggtaattttaagctactcctattgaacaaccaataataaacaaactcctgagatctccttaagcaaaactttttctccactcttttattgttaaaaattatatcatttctatgaatccatgtagatttgagcaaagccaccaccagcaccttgaccattttgattctcgacggggctcggaaaacacaatcaatccaagcaaagcaatcccttagagtttcaaaagaaggaatagagcagttgaccaacaagccgagtctcgcccataaccaggttacgaaatcacattagaagaacaggtgactagtatcctccgcttgatcaccacaaatctcacaatttgagcttgggacatcgaagcccatctccactagatttttttcgaaccgcaattctgc

SEQ ID NO: 398 - protein, 576 aa, Taraxacum kok-saghyz
MILAQLARALVSLWEVQCSNLLDSVMHRVLITHEGVRYEYYQCSGNPSREAPCVKFLPGNPMVRTALRMSRTRALSEIMGAWLPLIHPPNKCAACYRQFNKKEHLVEHMRISYHSLHEPMCGICGKRCRSFESLRDHLIGPLPKAECERVFRDRGCTICLTILNSPYSLKVHQDRCQLARGSNGVLHRFANMGIQDDLRIDSGKTRAVALACKMVGGGSDGSLDICARVCIIDEYENILFHSYVKPQLPVTNYRYETTGIRPEYLRDAMPLRNVQRKIQDFLCNGEPIWKIRPRGGNARILVGHGLEHDMKCLEIQYSLVKIRDTAKYPPLMKTSKLSNSLKYLTKSYLGYDIQNGIQDPYDDCVATMRLYRRMRSQAHRMEEYPLATDSQNKNNFSSWRQGELEKMSPDELLAISRDRVATKSNLEKMGIRAGKFGTIVVIYYSYASYISTTDSDTDIQCFKLVHLRRGDCTETRPSCAPLNLMNRLHPGLMTLKAPKIVIIVIWKIDIESKKKKPKVMKRVGTVLELLLLRRSLCAGFQDVLAPLFLPGFLPFGAGDVLESCCLGALFFAWGCL

SEQ ID NO: 399 - DNA, 1731 bp, Taraxacum kok-saghyz
  source 1..1731: mol_type = other DNA
atgattttggctcagctggcaagagcgctggtctccctctgggaggtccagtgttcgaaccttctggacagcgtgatgcatcgggttttaataacccatgagggtgtgaggtacgagtattatcaatgctccggtaatccttcgcgcgaagccccgtgtgtgaaatttctccctggaaaccctatggttcgaactgcccttcggatgtctcgaactcgggcgctctctgaaataatgggagcgtggcttccgttgatccatccgccgaacaaatgtgcagcatgctataggcagtttaacaagaaggagcacttggtggaacacatgaggatttcatatcactcacttcatgaacccatgtgtggaatttgtggcaaacgttgtcgctcttttgaatctcttcgtgatcatcttataggaccattgccaaaggccgaatgtgaaagagtgtttagagaccgtggatgtaccatttgcctaaccattcttaatagcccatattctctaaaggttcaccaagatcgatgccaactagcacgtggaagtaatggtgtactgcatagatttgcaaacatgggcattcaagatgacttgagaatcgatagtgggaaaacaagagcagttgcacttgcttgcaagatggttggaggtggtagtgatggatctttagatatttgtgcaagagtttgcatcattgatgaatatgagaacatattatttcattcctatgtcaagccacaacttcctgttacaaactataggtatgagactacaggcatccgaccagagtaccttagggatgcaatgccactcagaaatgtccaaagaaaaattcaagattttttgtgtaatggggaaccgatatggaaaatacgtccaagaggtggaaatgcgaggattcttgtaggacatggtttggagcatgacatgaaatgtttggaaattcagtattctttagtaaagataagggatactgcaaaatatccaccattaatgaagacaagcaagctaagcaactcactcaagtacctaacaaaatcttacctagggtatgatattcaaaatgggatacaagatccttatgatgattgtgttgcaacgatgagactttatagaagaatgagatcacaagctcatagaatggaggagtatcctcttgctacagattcccaaaacaagaataacttttcatcatggaggcagggtgagcttgagaagatgagccctgatgaattgttggcaatctcaagggacagggtcgcaacgaagagcaatttggagaagatgggaatcagagcagggaaatttggtacaatagtcgtaatatactacagctacgctagttacatcagtactacagactctgatacggacatccaatgcttcaagcttgtacaccttcgacgaggagactgcacagagactagaccatcgtgcgcaccgttaaacctgatgaatcgcctccatcccggtttgatgaccttgaaagcaccgaaaattgtgattatagtgatatggaaaatcgacatagaatcgaagaagaagaaaccgaaagtgatgaagagagtcggaactgttcttgaactcttgctgcttaggcgttcgttatgtgctgggtttcaggacgttcttgctcccctgttccttcccggctttctcccctttggtgctggtgatgtcttggagtcttgctgtttgggtgccttgttttttgcttggggctgtttgtga

SEQ ID NO: 400 - DNA, 9263 bp, Taraxacum kok-saghyz
  source 1..9263: mol_type = other DNA
gaaatggcggagttaaataatctgatcagcattgtgtctcaaatccggacctcggtgggtcaagatctctggatttccgaattgtcttcagatggtctttttgctgttcgtgatctgcgccatgccatcgatgaggtgatcactactccggctcctaacccgactatttggatccacattatcccggtgaaagttatttgttttgtttggcgagtgtgtctagatcgtatcccaactgctatcgccctatcaaagcgtggtgtccaagtcccgtctagtagttgcgcgttttgtatcaatggaattgatgaggtaaatcacttgatggccgactgtccttttgcaaaagaaatcctcgagtggatttttgcctggtgtggtattcctttgcctcagttctcaaaagtggtggacattgtggacttcgccggtaactggggtcgttgtccaaagaaacgcaaaattatggtggctatttgttacggatatatctggagtttatggaaggctcggaatgacaaggtgttcaacaaatgctcaactccggtggggaagatgaaagacaatatcgttttattggttttcgattggattaaaaacagaggaaattataaaaattgtaatttaccagtgtggagttgttccccctttgatattttgtaattttgtccctttcctgcccctactttttttctcttaaggtggtgtcttaataaaattgccttttcaaaaaaaaagaaccagataaaaaagaatgaaaaaaactggacccagtgtcaatggtatccatgcaaattttatgctgcgttctttttcacaatcttgtttttatttgggtacattttcaaagctcgaatcttcttggtcaaaagtttttcatcccagaatccccacatcttttgtgcaacccatgatagtaacaactacaaaaggaaatctaggacccggttcacccattacatattattacatgtatgtttgttggctcactactaataaggtcacttctttacataactataatggaaaattacagatattatcccgctattattagtttgcaaaattacagacttggtcttcgcgtaatagtaaaattacataaaatgtccgtgactccatgggtcctaacactttgcatggaacatggtcttcgcttgatagtaaaattacataaaatgtccatgactccgtaggtccttacactttgcatgaaatagagaaaatagagtgactgtccctggcgtaaaatgtaaaagttacagaaatagtctatgcgtaatagtaaaattatagagatgactcctatgccatatatagtggaaaacaatattatagaaatagtttttatgtccttacatattttaggaaataaagttgtgtattagtttatttggttgaaaataaacttttgtacatataggattaacaaactctcgtggcaacatgccgcttaaaaccctcgtgttccaatacatttaagtgattagctaggattttatgattttggctcagctggcaagagcgctggtctccctctgggaggtccagtgttcgaaccttctggacagcgtgatgcatcgggttttaataacccatgagggtgtgaggtacgagtattatcaatgctccggtaatccttcgcgcgaagccccgtgtgtgaaatttctccctggaaaccctatggttcgaactgcccttcggatgtctcgaactcgggcgctctctgaaataatgggagcgtggcttccgttgatccatccgccgtttccaaaaaaaaaaaaaaactatgtgaattcaatagtataacatttactgcatgaagatacaaaaaatgtcatcttaatttagaaatatgctaactaatgtaatagtgtgtaaccaaggtgaacacaatagcatgtgagcatggaatatattgccatcatatagaagcataaaggagcaaaaatactctctaaatcctaagtgttgaccaaattctgcaagtatgaactgtgtttttcttgaatggggcatgtgcattgaagattccaaagatggagaccgaaatccgtatgcactagcgcgaaaaaagggtcttaaaggaatcagtccttttgttgtactaatcttaatgttataaatacattgcacgttcctaccatttcttactacaagtcctctcagttttttgataaaaagattgatttagtgatatcaaagttgagagaacaattaatggattctgagactcaaaggtagtaagcataaaatactcgcatttcatacaaaaactaacacacaagttgttaaaaatgatacaataaaatcatcttgcttttgatcttattattaattagcatgttttttactaggaacaaatgtgcagcatgctataggcagtttaacaagaaggagcacttggtggaacacatgaggatttcatatcactcacttcatgaacccatgtgtggaatttgtggcaaacgttgtcgctcttttgaatctcttcgtgatcatcttataggtataattacattatcattattatatgttttaaaaagtttagttactatatattgatggtattaacatatatgaattcgggttttccacaggaccattgccaaaggccgaatgtgaaagagtgtttagagaccgtggatgtaccatttgcctaaccattcttaatagcccatattctctaaaggttcaccaagatcgatgccaactagcacgtggaagtaatgtaatgcatcattatatatatccttcaacttataattttccagcaaatgacttatagtctagtagtattaggtgttgacacagtgatcactctcagccttaatccgtgagggttcatttcctgtcatatgaaataatgttctagttttggttgtatacataaatataaaaaccaaagagcttctaccttagcggtatccagtgttttcctccctctttgaggtcgatggtttaaatcttatatgagacataggtgaatatacggagtagtttaggattagattagaattgtcttttcaaaaaaaatataaatacaaaaatatacccaattttgatatatttatatatgttccagggtgtactgcatagatttgcaaacatgggcattcaagatgacttgagaatcgatagtgggaaaacaagagcagttgcacttgcttgcaagatggttggaggtggtagtgatggatctttagatatttgtgcaagagtttgcatcattgatgaatatgagaacatattatttcattcctatgtcaagccacaacttcctgttacaaactataggtgctatatagttttccataataaaattataaaacaaagttgctattttcttatttaagaaagtatgcaggtatgagactacaggcatccgaccagagtaccttagggatgcaatgccactcagaaatgtccaaagaaaaattcaagattttttgtgtaatggggaaccgatatggaaaatacgtccaagaggtggaaatgcgaggattcttgtaggacatggtttggagcatgacatgaaatgtttggaaattcagtattctttagtaaagataaggcacgtatatatatttagctactttatttaatatttatacatatatataattagtcccataacttattgtacttaactaatagtaattatatgcacttgttattggatagggatactgcaaaatatccaccattaatgaagacaagcaagctaagcaactcactcaagtacctaacaaaatcttacctagggtaaagacattacctttatttttataaagatatgtgatatgttagtatgttcctgatgaatttttattgtataggtatgatattcaaaatgggatacaagatccttatgatgattgtgttgcaacgatgagactttatagaagaatgagatcacaagctcatagaatggaggagtatcctcttgctacagattcccaaaacaagaataacttttcatcatggaggcagggtgagcttgagaagatgagccctgatgaattgttggcaatctcaaggtctgattactactgttggtgcttagatagcaaagatgtggcttgaaatgaagggaagattgaagaaaatagctaaactgatttaaaactcatcaaatataaatggaataaacatggatacacatatatttaaaatgttttacatctctattaatttagaagtagtaagaaggcagctgtattgctatgtaagcagtggcggatccagaaaaaaatttaagtgggtgcaatctaaatttttataagatttatattaattttctagtattttaaaatataaaatcatatatgttatatagaaaaattggaaaaattaatatttaagtgggacactccacccccttggctaagggtggatccgccactaagttgagtgaaaataaatacatctttgtttgctaagaatgttgagcacatagtatccatacttgaatcctatattcactaaagggttagttatatatgtaaaacattcaattatattattcttttagataaaaccttaactttaaacatttgtttaataaaatcttttcattttctttcgaataagatcctggacttcttttaatttttttctaaaaaatattcatatttatttcttttttgaaaaaaaatctctttgtttatttctttctagaaaaaccttcaacttatttttacgaaatataaggctaaatttttttcaaaagaaaatgtctaaaattagaaaattaaaaataaacttgctaatataattaatacaatatatatatatatatattatatatatatatatatatatatatatatatatatatatcatcagggacagggtcgcaacgaagagcaatttggagaagatgggaatcagagcaggttcgatcctatgtgctttttgtagaaatgccactgaaatggcgaatcatgtgttttgtagctgcccattaaagaaatatggaataaagtgtatggatggtggggtcaatcatttggggacaaaaataatgtggaggacatactggaagatctagtggcaaactcaagccacaaaagagatgagaaagtaagattagtggtgtgggccgcggtgctttctcagatttggaagtaccgaaatgaagtaatctttgaaaataaaaccaaaacagtggaggagattttcttaaaagcccaaggtgaagcagccttgtggttggaaagtcgggcctcaaaagtggagatagatagattgtcttgagccttgtccccaaactagcctgtaaatttatgtaactcgttgtttggcatcccagtttctggctgggattcctagtttgtttttaatacagttgcctttcaaatatatatatatatatatatatatatatatatatatatatatatatatattatatatatatatatatatatagaagttggtttaaacgagaacaattattgaatttgagaacgtgagaacaaatttgggtcacttattttttattaatcatatgtgatttttcacatacgatttacatgtataaaatcatatgtgatttttattagtcatgtgtaaatcatatgtgattatatatgatgttttttagcatgaaaaataagtggcttagatttgttcttgtgttctcaaattcaataattattctcatttgaaccgtcctatatatatatatatatatatataatatatataatatatatatatatatatatatatttttattatatatatatatatattgaagccagggaaatttggtacaatagtcgtaatatactacagctacgctagttacatcagtactacagactctgatacggacatccaatgcttcaagcttgtacaccttcgacgaggagactgcacagagactagaccatcgtgcgcaccgttaaacctgatgaatcgcctccatcccgtaagttggcgtcttcgggctagtgaccactaggtaaaccagcagccccgggtacacgaaaccttcgctagcactgaggcctgcaagaatgagtaatatcttttcaaacttgcagccggggaggatcgaacccgcgcctctcctaagagcggcacttgtccttaccatccggaccacggaggagtgtgcatatatatatatatatatatatatatatatatatatatatatatatatatatatatatatatatatatatatatatatatatatatatatatatagggagaggttataatgagaaataaaaaatggtgagaacgcgagaacgattctggaccaatcaatcttaaggatatattagtaatttaataattcaatcatttattaaatcaaattaataaaacccccataaattaggaaattggatattaaaagatatatttcgatcctataatctctctaaagataaattcaaagatattatatttgacttccattcttccacctgttaattacagcgaccgagtttcttcttccttcttcatcgtcgatcaagagtttcttcttccttcttcatcatcgataaaaaaaaattagggtcagtgaccgactttcttcttccttcttcttcatcatcgatcaaaaaaattagggccgacaaaccttcttgttcaatacaaaagaattagggccgacttctttcatctttcttcttgttcctcctgatatcttcattaaaccgataactaatacatatatttgtaattgattaaatacaagatggattttgccgattgaagggtttgatgaccttgaaagcaccgaaaattgtgattatagtgatatggaaaatcgacatagaatcgaagaagaagaaaccgaaagtgatgaaggtatgtattagtaatttttatattttcatagttgaatggatgattgttagtatatgttgttaatatgctgttaacagagagtcggaactgttcttgaactgtaatttgtatacgtctagttataatcattaatgattataacttcctaaatgttttaacgttataatcattgatgatttcattcttcacgttataaaactatagatatatatgtttagactagtttaaatctagtattatattggtctattgtacttagtagtttgaaagttgaatatgtttatatgtaatgattaaaattattaagattaacgtagttttgattaaacaggtagtcaaaagcaacgtaacttcgactttaaagggatagaatgtaaagcattgattaaccagagaatgtgcaaaggttgtcgggaatatgtcggacataattgggttcgtcggttgtgagccttactgttggttctgagggccacttttggttttgtcttgggtccacgtttatgtcctggtcctgctgcttagtttttgacgattttgtccctgagggtgtatggtgctttgtttcgaatgtttggagctgtcctagagcgttgctgacatttttgacttttttgcccctaagggtggaggttctttcttgttggttcgggttgatgctgctgcaactatggtgggctttgcggatggggtttttggacacttttacccctgtctgctaggttgtcttcttggttggtccttgtgctgttttgaagttttgatgtcttgttgctctgttcagcttgctgcttaggcgttcgttatgtgctgggtttcaggacgttcttgctcccctgttccttcccggctttctcccctttggtgctggtgatgtcttggagtcttgctgtttgggtgccttgttttttgcttggggctgtttgtgatagtagtcggttaggtagtgttggtgtcttaatgctggcatcggtttatttatttaatttgcagccgttaaaaaacataattgaggaacttgtgaagttagaattgcaagcaatgggactgataagagcagtcaatagataattgaaattgtttttgtttgaacttttatggtatatgtgaatgaacataatatatttgtttgaattgaattatttaaatcatttttgttttgaagtcaattagtagacaacactacatacaaatcaacaaaatatatgaattattgaaaggtgaaacatatatgaaaacttaattatggattaggcttaatcattaatgattaaaactacaaaaacacaacaacaaatgtaagctaatttgaattcgccaatgattttaacttataatcatacgtgatcaagattagtatgtatttatgttcaattgaaatcaacaatgatttaatttataatcatgaacgacttaacttataatcatcaatgattaactgattaactaagtaattatcagagtgtctatacttagtagtagatatattaaatctgtttatacgtaatgatttaacaaaatcacataatacatacttttgtttattctataaaaacttgtaaataatattgattaaaatgtatatgagtttacaaacattacatacaaattacatttattcagccataatcatattgtgttggaaaatcatcaataatttaacctctaagcattgactataaaaatgtttaagaaattatcaataattaacgttaaaaaatatataaagacaacacaaatcatcaatgattaacacatgttgtattgttggggtattttcctttgtattgtcaacttcagctacctccggttcagtttcaggttgagctttagatcttgagcttgatttttggattgagatttgggtcgacttttggatttctctagtgtagatttatttcctgttattacaaatgtgaactatgataagaattacacatattaaaaatcatagattattgattatgtgtatctagaggaacctgtatttgttaatcattaatgaataaccaacacatattcatcaataattatagtatgttataaatacaggtcagaaatgaaagtttatgtgtttcacctctcattacaatcatgattaaccaacacatattcatcaatgattttattatgttataaattcaaatcataaatgatagcttatgtgttccagtttacatttcaaacatcaattattataaaacgagacgaattcccgcgcgttgtgcaaggagattaaaatatgacataaaaataaacactacgtaatttagagtcaattaagttaaattgttgtaaaataaattggttataattattggtaatggttttatttattaaaattagaatcttaatttaaacaatacgtttaaattaacatacatacacaatgtacatgcatatacacttcataatatagttacatcaat

SEQ ID NO: 401 - protein, 345 aa, Taraxacum kok-saghyz
MWLLNGFLTRNKCAACYKQFNKKEHLVEHMRISYHSVHEPMCGICGKRCRSFESLREHLIGPLPKAECERVFRDRGCTFCLNILSSPHALRFHQDRCQLSRGNNGVLHRFANLRIHDGLRIENEKTRVVALACKMVGGGSDGSLDLCARICVIDEYENILFHSYVKPQLPVTNYRYESTGIRPEYLRDAMPIRHVQRKIQDFLCNGEPIWKIRPRSGKARILVGHGLDHDMKCLELEDTSKYPPLMKTSKLSNSLKYLTKAYLGYDIQNGIQDPYDDCVATMRLYRRMRYQAHRIEDYPLATDPQNKNNFTSWRQGELERMSPDELFAISRSDYYCWCLDSKDVA

SEQ ID NO: 402 - DNA, 1038 bp, Helianthus annuus
  source 1..1038: mol_type = other DNA
atgtggctactaaatggtttcttgactaggaacaagtgtgcagcatgctataagcagtttaacaaaaaggagcatctggtggaacatatgaggatttcgtatcactcggttcatgaacctatgtgtggaatttgtgggaaacgttgtcgatcatttgaatctctccgtgaacatcttataggaccattgccaaaggccgagtgcgaaagggtgtttagggaccgtggatgtaccttttgcttaaacatccttagcagcccgcacgctctcaggtttcaccaagatagatgtcaactatcgcgtggaaataatggtgtcttacatcgatttgctaacttacgcattcatgatggcctgagaattgaaaatgagaaaacaagagtagttgctcttgcctgcaaaatggttgggggcggtagtgatggttctttagatctttgtgcaaggatttgcgtcattgatgaatatgaaaacatactatttcattcttatgtcaagccacagcttcctgttacaaactacaggtatgagagcacaggaattcgaccagaatacctcagggatgcaatgccaataagacatgttcaaaggaaaatccaagattttttatgcaatggtgaaccgatatggaagatccggccaagaagtgggaaggcaaggattcttgtaggacatggtctagatcatgacatgaaatgcttggaactagaggatacatcaaaatatccacccttaatgaagactagcaagctcagcaactctctcaagtacctaacaaaagcatatctcggctacgatattcaaaacgggatacaagatccatacgatgattgtgttgcaacaatgagactatacagaagaatgagatatcaagctcatagaatagaggactatcctcttgcaacagacccccaaaacaagaacaattttacttcatggagacagggtgagcttgagaggatgagtcctgatgaacttttcgcaatctcaaggtctgattactattgctggtgcttagatagcaaagacgtggcttaa

SEQ ID NO: 403 - DNA, 1582 bp, Helianthus annuus
  source 1..1582: mol_type = other DNA
atgtggctactaaatggtttcttgactaggaacaagtgtgcagcatgctataagcagtttaacaaaaaggagcatctggtggaacatatgaggatttcgtatcactcggttcatgaacctatgtgtggaatttgtgggaaacgttgtcgatcatttgaatctctccgtgaacatcttataggtataatactttttcttatcattattatttatattttcttatcacaacaccttgatggatatgtgtgtgtatactaattacttcttcaattctttaggaccattgccaaaggccgagtgcgaaagggtgtttagggaccgtggatgtaccttttgcttaaacatccttagcagcccgcacgctctcaggtttcaccaagatagatgtcaactatcgcgtggaaataatgtaatcaattgtatcctaaaactaattaatatttttttcttttttagatatataaatgtactgaactataagcttatacccctttttgtgatttaatcaatattccagggtgtcttacatcgatttgctaacttacgcattcatgatggcctgagaattgaaaatgagaaaacaagagtagttgctcttgcctgcaaaatggttgggggcggtagtgatggttctttagatctttgtgcaaggatttgcgtcattgatgaatatgaaaacatactatttcattcttatgtcaagccacagcttcctgttacaaactacaggtaccttctttttcaccatctattcctatagttttgagggcactacttacacaagggtggatacgacggaaacgtcacaagtttcctcaagtaagcatgcaaaattttgttttcaggtatgagagcacaggaattcgaccagaatacctcagggatgcaatgccaataagacatgttcaaaggaaaatccaagattttttatgcaatggtgaaccgatatggaagatccggccaagaagtgggaaggcaaggattcttgtaggacatggtctagatcatgacatgaaatgcttggaactagagtatcctcttgcaaaaataaggcaagtatcttcatgttatttatcacctatttgcgtgattaacttaaatatttattaataatttttcatgcctctttattactttatagggatacatcaaaatatccacccttaatgaagactagcaagctcagcaactctctcaagtacctaacaaaagcatatctcgggtaataataatgataataccacgctttagtaatgttgaatatctttgttacccacacatttttagagctagctaaaagatacacatgttaatgattaatcggttcttttacagctacgatattcaaaacgggatacaagatccatacgatgattgtgttgcaacaatgagactatacagaagaatgagatatcaagctcatagaatagaggactatcctcttgcaacagacccccaaaacaagaacaattttacttcatggagacagggtgagcttgagaggatgagtcctgatgaacttttcgcaatctcaaggtctgattactattgctggtgcttagatagcaaagacgtggcttaa

SEQ ID NO: 404 - protein, 323 aa, Helianthus annuus
MRTSYHSVHEPICGICGKRSRSFESLREHLIGPLPKAECERVFRERGCDLCLNIFGSRNALRVHRDTCQLSYGYNAVLYRFANLGIQDDLRIDNGKSRAVALACKMVGGGSDGSLDLCAKICIIDEYENILFRSYVKPYLPVTHYRYETTGIRPEYLRDAMPLRQVQRKIQDFLCNGEPMWKIRPRGGKARILVGHGLDHDLKCMELEYPAIKLRDTANYPPLMKTSKLSNSLKYLTKAYLGYDIQVGIQDPYEDCVATMRLYRRMRSQAHRNENYPLASDPQNKNNFASWRQSELERMTPEELLAISRSDFYCWCLDGKDYV

SEQ ID NO: 405 - DNA, 972 bp, Helianthus annuus
  source 1..972: mol_type = other DNA
atgaggacctcataccactcggttcatgagcccatttgtggaatttgtggaaaacgctctcgatcatttgaatctcttcgagaacatcttataggacccttaccaaaggcagaatgtgaaagggtgtttcgcgagcgtggttgtgacttatgcttaaacatctttggcagtcgcaatgctctcagggttcaccgagatacatgccaactatcatatggatataatgctgtactataccgatttgctaacttaggcatccaagatgacctaagaatcgataacgggaaatcaagagctgttgcacttgcttgcaagatggttggtggtggtagtgatggttctttggatctttgtgcaaaaatttgcatcattgatgaatatgagaatatattattccggtcctatgtcaaaccataccttcctgttacacactacaggtatgagacaactggcattcggcccgaatacctcagggatgcaatgccacttagacaagttcaaagaaagattcaagatttcttgtgcaatggagaacccatgtggaagatccgcccaagaggtgggaaagcaaggattcttgtaggtcatggtttggatcatgatcttaaatgcatggagttggagtaccctgcaattaaattaagagatacagcaaactatccacccttaatgaagactagcaagctcagcaactcacttaagtatcttacaaaagcatacctcgggtatgatattcaagttgggatacaagatccttatgaagattgcgttgcaacgatgaggctttacaggaggatgagatcacaggctcatagaaatgagaactatccgcttgcttcggacccacaaaataagaataactttgcttcatggagacaaagtgagcttgagaggatgactcctgaggaactgttggcaatctcaaggtccgatttctattgttggtgcctagacggcaaagactatgtttaa

SEQ ID NO: 406 - DNA, 1507 bp, Helianthus annuus
  source 1..1507: mol_type = other DNA
atgaggacctcataccactcggttcatgagcccatttgtggaatttgtggaaaacgctctcgatcatttgaatctcttcgagaacatcttataggtactggctacatgatatagatttgttaagagtgattgcacaccatgaattttcactcacaaatgatcatatcatgtgttataacatgattttcttagcatcaagaacatggcttacacataccacttacttttttttcacaggacccttaccaaaggcagaatgtgaaagggtgtttcgcgagcgtggttgtgacttatgcttaaacatctttggcagtcgcaatgctctcagggttcaccgagatacatgccaactatcatatggatataatgtaataaatcatcgaccttgattgaaaatgcatttattttctctgtgtgctaatcaggaaattaaatccgctccacgcttatcaattatttcaggctgtactataccgatttgctaacttaggcatccaagatgacctaagaatcgataacgggaaatcaagagctgttgcacttgcttgcaagatggttggtggtggtagtgatggttctttggatctttgtgcaaaaatttgcatcattgatgaatatgagaatatattattccggtcctatgtcaaaccataccttcctgttacacactacaggtattttattctgccttcttgtactatatatgtatctgtgagtgtgtgttactctattatgtaagtattacacaataaattttgaatttacataggtatgagacaactggcattcggcccgaatacctcagggatgcaatgccacttagacaagttcaaagaaagattcaagatttcttgtgcaatggagaacccatgtggaagatccgcccaagaggtgggaaagcaaggattcttgtaggtcatggtttggatcatgatcttaaatgcatggagttggagtaccctgcaattaaattaaggcaagcaagctagcatcttcttgtagactatcacatgatataaatatgtatgaccatttatcatgatatattcttgatgtttataaagatttggtttttgtaacatatagagatacagcaaactatccacccttaatgaagactagcaagctcagcaactcacttaagtatcttacaaaagcatacctcgggtaatctttggtagaccttgatcatgtttatatagaattagtgactaaaaagagccataatttgaaataatggatggacttttgattacacaggtatgatattcaagttgggatacaagatccttatgaagattgcgttgcaacgatgaggctttacaggaggatgagatcacaggctcatagaaatgagaactatccgcttgcttcggacccacaaaataagaataactttgcttcatggagacaaagtgagcttgagaggatgactcctgaggaactgttggcaatctcaaggtccgatttctattgttggtgcctagacggcaaagactatgtttaa

SEQ ID NO: 407 - protein, 356 aa, Helianthus annuus
MDHRYESSETLRNKCSACYRQFNKKEHLVEHMKISYHSVHEPMCGVCRKHCRSFESLREHLIGPLPKAECERIFKDRGCDICLTILASRNALRAHRESCQFSLQGLHYRMANLGIQDELRIDNSRGRVVALACKMVGGGSDGSLDLCARVCLIDEHERIIFHSYIKPNLPVTNYRYETTGIRPEYLRDAMPVRNVSRKIQEFLCNGEPIWQIRSKGGRSRILVGHGLDHDLKCLEMEYPAIKIRDTAKYPPLMKTSKLSNSLKYLTKAYLGYDIQIGVQDPYEDCVATMKLYMRMKAQFHKKENYPLATDPQNKNNFASWRQNELERMSPEQLLDFSRSDYYCWCLDTKIINWRGI

SEQ ID NO: 408 - DNA, 1202 bp, Petunia axillaris
  source 1..1202: mol_type = other DNA
cttcctcaaatcttctcaactatctttcctctactcaagactagagtttgaagaatctaccacaattctactataatggatcatagatatgagtcctccgagactctcaggaataagtgttcagcatgctataggcagttcaacaaaaaggaacatctagtggaacacatgaagatatcctatcattcagttcatgagcccatgtgtggagtttgcagaaagcattgccgttcttttgaatctttaagggagcatcttatcgggccacttccaaaggcagaatgtgaaagaattttcaaggatcgaggatgtgatatttgtttgacaatcctagctagccggaatgctctacgggctcatagagaatcatgccaattctctttgcagggattgcattatcgcatggctaatttgggcattcaagatgaactaaggattgataatagccgaggaagagtagttgcacttgcttgcaaaatggttggtggtggcagtgatggctctttggatctctgtgcaagggtttgtctcattgatgagcatgagaggatcatcttccattcatatatcaaaccaaaccttcctgtcactaactacaggtatgaaaccacaggcataagaccagaatatttgagggatgcaatgccagtgagaaatgtgtcaagaaaaatacaagagtttctttgcaatggagaacctatatggcaaatccgttctaaaggaggaaggtctaggattcttgttggccatggtttggatcatgatcttaaatgtctggagatggagtatcctgcaataaagatcagggatacagcaaaataccctccactgatgaaaacaagcaagctcagcaactctctcaaatacttgaccaaagcttacctagggtatgatattcaaattggagtacaagatccctatgaagactgtgtagccacaatgaaactctacatgcgaatgaaagcacaatttcacaagaaagagaactaccctcttgctacagatccacaaaacaaaaataactttgcatcatggaggcaaaatgaacttgagaggatgagtccagagcagctgttagatttctcaaggtctgattattattgttggtgtttggacacaaagataattaattggagaggtatatgatgaagaaagatagagagaaaagcaacaagatttgatatatatatgttttgaattct

SEQ ID NO: 409 - DNA, 2480 bp, Petunia axillaris
  source 1..2480: mol_type = other DNA
tgattttttaaacacaaatacactgtctgtcacctccttctctaaatccgctcgatatcagacaaacaggtcggtaattataaatgagatttaagtcaggtttttgtaaaataatgatttttgaggtcttacttaacgccaagactttcaaaaagtgtcttcaaagagacctgtataaataccttgcacaccctcaccttcttcctcaaatcttctcaactatctttcctctactcaagactagagtttgaagaatctaccacaattctactataatggatcatagatatgagtcctccgagactctcaggtacttaaactaataccgttaattattttcgttgaaattgtgtgaccatgaaaacgcatctcgtctataagtttaaactgttagataggatgtataacacacttttattttattatgtcttttgacaatttttgcaggaataagtgttcagcatgctataggcagttcaacaaaaaggaacatctagtggaacacatgaagatatcctatcattcagttcatgagcccatgtgtggagtttgcagaaagcattgccgttcttttgaatctttaagggagcatcttatcggtacatatacccaaatctttctcaaaaacatgttaactttaattatcagtctaccaatttattggtcatgaattctaatttgtttgtttgatcagggccacttccaaaggcagaatgtgaaagaattttcaaggatcgaggatgtgatatttgtttgacaatcctagctagccggaatgctctacgggctcatagagaatcatgccaatcgcgtccaaataacgtatgtgtaataaaactgtagaactatatgatcatttcatctgaaagtttaaggtgtcggatttgaaaagattaagctatcataaagaacattcattaaaatatttaaatatgtcttaaacaaacatgtgtgataacacatgaagctatgttgattctctttgcagggattgcattatcgcatggctaatttgggcattcaagatgaactaaggattgataatagccgaggaagagtagttgcacttgcttgcaaaatggttggtggtggcagtgatggctctttggatctctgtgcaagggtttgtctcattgatgagcatgagaggatcatcttccattcatatatcaaaccaaaccttcctgtcactaactacaggtaattattcgaatgatttaagttatatatactgacagtctgttacacgtacgttttaatatgcgatagcataaactttatttgtaattatatgaaatatgtgtttaggtatgaaaccacaggcataagaccagaatatttgagggatgcaatgccagtgagaaatgtgtcaagaaaaatacaagagtttctttgcaatggagaacctatatggcaaatccgttctaaaggaggaaggtctaggattcttgttggccatggtttggatcatgatcttaaatgtctggagatggagtatcctgcaataaagatcaggtaaactctttgatccactctttaaagacaattttatgactttattgttataagtaatactccctctgttccaatttatgtagcagcatttcctttttagtctgttccaaaaagaacggcaacattctaaatttgataactatttaacttcaaaattacaattttgtcattttgtcattgatgaatataattcgaccttcttggttagtactttcatacttataattatagagttggttcttactttttgttcaacttattttcttctcaagggatacagcaaaataccctccactgatgaaaacaagcaagctcagcaactctctcaaatacttgaccaaagcttacctagggtaattgcataaaactttatacttttcttgtccccactagtaaataatttatcgcaactttagaatctaagaaaataaatggtcatattaaaattgtgtaggtatgatattcaaattggagtacaagatccctatgaagactgtgtagccacaatgaaactctacatgcgaatgaaagcacaatttcacaagaaagagaactaccctcttgctacagatccacaaaacaaaaataactttgcatcatggaggcaaaatgaacttgagaggatgagtccagagcagctgttagatttctcaaggtctgattattattgttggtgtttggacacacaagataattaattggagaggtatatgatgaagaaagatagagagaaaagcaacaagatttgatatatatatgttttgaattcttagtcgtagatatcaagaattcaaatgatattcatgaaagccaaaatttagtacgtagtatatatttatttgcatgtctactttgtaatagatatagttgaaataaagatgattttcacttgctacaatgagtgggtcaaagttttttacatgcatagaagtttaacttttctgccatgcatatatgtgctctac

SEQ ID NO: 410 - DNA, 1717 bp, Petunia axillaris
  source 1..1717: mol_type = other DNA
aaaggtacccgtgacagccgaagtcaatgaaagaaaagagaaataatgggcccaagaatctggaacatacatagatcattacgaatgcaataatgctatacgctaccaacaaactgcacgacaagatagaggagaggaagcatggccaaagaaaaagaaaaaagtagaggaggaatcggaaattaatatactgaatattgcctttaggaatcgtccatttatgcaagttggagcaatagtacctctaccctttccctataaatatcaccccactcctacctttgcgaatattttgtatgttcagtgaaagtaaaacaaattaaattaacaagaaacttatagaagaaaatttttactatttaagagaaagaaaaaaatctatcatttaatctgagtcctaaaaactgttatacttaacagttaacgcatgatttgatggaggagccatagatgcaattcaatcaaactgaaatttctgcaagaatctcaaacacggagatctcaaagtttgaaagaaaatttatttcttcgactcaaaacaaacttacgaaatttaggtagaacttatatacattatattgtaattttttgtaacaaaatgtttttattattattatagaattttactggttaaattaaaaatgaatagaaaaggtgaattaagaggagagaggaggtaaacattttcttctattttttcatattttcaggataaattattgtaaaagtttacaagatttccatttgactagtgtaaatgaggaatattctctagtaagatcattatttcatctacttcttttatcttctaccagtagaggaataaacaatatttagctcctttgtaaatacaaattaattttcgttcttgacatcattcaattttaattttacgtataaaataaaagatcatacctattagaacgattaaggagaaatacaattcgaatgagaaggatgtgccgtttgttataataaacagccacacgacgtaaacgtaaaatgaccacatgatgggccaatagacatggaccgactactaataatagtaagttacattttaggatggaataaatatcataccgacatcagtttgaaagaaaagggaaaaaaagaaaaaataaataaaagatatactaccgacatgagttccaaaaagcaagaaaaaagatcaagccgacacagacacgcgtagagagcaaaatgactttgacgtcacaccacgaagacagacgcttcatacgtgtccctttatctctctcagtctctctataaacttagtgagaccctcctctgttttactcacaaatatgcaaactagaaaacaatcatcaggaataaagggtttgattacttctattggaaaacctcaagtccaagtcttttctattctatttcttacgtaataattatatagattagtataaagaactatggattgcagaatagagagtgccgaaactcacaggttttcttaatttcttacatccatgcacaagcgcacacatgcatacatcacatatgaacgagtgcatgtgcttctatactattaaacattgaattgcataaaattaaaaatgaattataatcaacagtgcatggatatgtataaataacaatcatgttttttttttttttttttgcaataggaataagtgtgcagcatgcttccgacagttcaacaaactggagcatcttgtggagcacagaattcttt

SEQ ID NO: 411 - DNA, 2092 bp, Arabidopsis thaliana
  source 1..2092: mol_type = other DNA
aaaggtacccgtgacagccgaagtcaatgaaagaaaagagaaataatgggcccaagaatctggaacatacatagatcattacgaatgcaataatgctatacgctaccaacaaactgcacgacaagatagaggagaggaagcatggccaaagaaaaagaaaaaagtagaggaggaatcggaaattaatatactgaatattgcctttaggaatcgtccatttatgcaagttggagcaatagtacctctaccctttccctataaatatcaccccactcctacctttgtctctcgacagttgcgaactgaatgcttagttggtaatgttatgccctatcgctttttgcaccgtcccatgcatcattacccccacacacctccatcaacctctaaaaagttaagagtgaaaattacacacacccgaggagaagaaaagctgcttcttctaagcaacacgacctagttactttacttgtagggcctttccctttttcctaaattacccctcttttcatcatatgataataatatccagctcagactatagaatgatattatgatagcattatagagttgacactaaagagcattatacatgttgcacctgacattcaagttcataaatactaacactatgcaatagataacatatcctcaaataaatgccacacgtttgggtgctcaaataacctcaaaaaggttaataggatgggatttaagagtcaaggaatataccatagattttaactgtttttaaaaatgtattgttaaatcttcaattattattaaatgagacccattatagaaataaggaacataaatttaggttcaccaaacaaaattagtacttaaaaaaatgacaccaatttaataatttaatcaaataaaatgacatttatttaattcatcaataataaaaagtaccgtaatattattaaatgttcaattaatagtgttatcataatctgtacataaaaagcaatcacttttctatataattgagagattaaattaatatttgtttaaactatcactgaatccatttaccgaccttttatatgccattttttatatatatttgtatgctttaaaatcacggaaaaaaaattatagaaaattctaacatgatcatttcaatcatcaatttaaacaactctaaatcgaaaacattgaataaactagaaatgatacctgggaatttggaacaagagacattccgcaaaagaaaaaatatgttgaataattgaaacggtgacaagaaaagaggaataatgaaaatcaataaaacagagatggggggttattgttattcgaggagacgagtgaaatgagtgagtgaggggggtgtaactggaaagcaagaaaaagcacaagagtgccagctatttccaacaacaaacgtggcccgtggatgcgatattggtaacggacggcgaggatggaaggacgtgcaatttgcgcttcatttgaggcgaatttcatttgaccagacctttcttttttaaaccacagggcgggtacctcagccacacacatacatcatcaaaaaacacacacgacacactcccatacacacacgttgtctcgcacacattccttcattccgcaggtatagccacgttctctcttccctctttcatccccggtgataagaacaagcacccaccgtttaacgctaattttatgtgtttttgttttttttttttttttgcagcagcaaacatctttaccttaaacgacaacaacctcaagtccaagtcttttctattctatttcttacgtaataattatatagattagtataaagaactatggattgcagaatagagagtgccgaaactcacaggttttcttaatttcttacatccatgcacaagcgcacacatgcatacatcacatatgaacgagtgcatgtgcttctatactattaaacattgaattgcataaaattaaaaatgaattataatcaacagtgcatggatatgtataaataacaatcatgttttttttttttttttttgcaataggaataagtgtgcagcatgcttccgacagttcaacaaactggagcatcttgtggagcacagaattcttt

SEQ ID NO: 412 - DNA, 1963 bp, Glycine max
  source 1..1963: mol_type = other DNA
ggtacccgtgacagccgaagtcaatgaaagaaaagagaaataatgggcccaagaatctggaacatacatagatcattacgaatgcaataatgctatacgctaccaacaaactgcacgacaagatagaggagaggaagcatggccaaagaaaaagaaaaaagtagaggaggaatcggaaattaatatactgaatattgcctttaggaatcgtccatttatgcaagttggagcaatagtacctctaccctttccctataaatatcaccccactcctacctttgggcctttgtttatgctaagtgggatgctaaaagtcatccaaacggataaattgctttttatttaaattttaaaaattaaaacttctaagtttttgaattttaaaattaattaaccaaagtcttaattaaaactgtccattaatttaaattttaagaatttaccaaaattgtcaactaaaaccgtacaattttttaattttaaaaaatgtgtgaatttgttaactatttttttaacttttaacaatctaccaatttgttaatttttaaaaatataccaatttattagtgcttattttttaaattgtaaaatcctagcaatttgttaattaaaccaacgtaaactaaacaattgttatttaaaaaaaaatatttttttttaattttaaaattcaaactattccaattttctattggctttttcttatactgtccaaattttattttaattttaataaaataacaattaactacaaaccaaatttttaaacaattattaagagattcatatttgttaatgattgtatcggataaaataaattttttaacctttttaaaaatcaacatcgtaaattaattattattatttagaaataaaaatatctttttaaatttaagattttattccatcccacaattttcttagttttttcttagataaatcagtattacttaaatattatcattttttttttaaaataccaaactatcccactacttcctttaattttatttttatcctaaaaaaacttaaaatgtgttttttttaaagaaatataaaaaatatttttccaacaataaaataaatataagctaatgcctttttttttaatttatataaaatataatacaaatatggatatacgggcgggcagagcggctgtgtttccgctagttttaataacagccttccaatttattacttgtatatcatatggctatcaaaacttgtgcaccgtgtgtgactacgctacttctacaccctataatccgtctccgtctccaacttaagaaaaaaaaaaaactacaacctttattttatttttctaatagtaaaaaattgtaaatatggaacagcagtgggccgcaatagaacgggcccattgtccagaaaaaaattgcgaaaatcttcacccgtcaccctttttcatttcatcaaatccctcgttttcctttcctttattcctatttcccacacttcttctttcatcattcatcgcctttcaccacgcacgcagatcctttattcctataatccttccttcgctctctccaaatttcgactctttcgatcagatccgcgacacccaccccaccaaaaccttgcgcaacccatcacctcaagtccaagtcttttctattctatttcttacgtaataattatatagattagtataaagaactatggattgcagaatagagagtgccgaaactcacaggttttcttaatttcttacatccatgcacaagcgcacacatgcatacatcacatatgaacgagtgcatgtgcttctatactattaaacattgaattgcataaaattaaaaatgaattataatcaacagtgcatggatatgtataaataacaatcatgttttttttttttttttttgcaataggaataagtgtgcagcatgcttccgacagttcaacaaactggagcatcttgtggagcacagaattc

SEQ ID NO: 413 - DNA, 1458 bp, Glycine max
  source 1..1458: mol_type = other DNA
atctctcgacagttgcgaactgaatgcttagttggtaatgttatgccctatcgctttttgcaccgtcccatgcatcattacccccacacacctccatcaacctctaaaaagttaagagtgaaaattacacacacccgaggagaagaaaagctgcttcttctaagcaacacgacctagttactttacttgtagggcctttccctttttcctaaattacccctcttttcatcatatgataataatatccagctcagactatagaatgatattatgatagcattatagagttgacactaaagagcattatacatgttgcacctgacattcaagttcataaatactaacactatgcaatagataacatatcctcaaataaatgccacacgtttgggtgctcaaataacctcaaaaaggttaataggatgggatttaagagtcaaggaatataccatagattttaactgtttttaaaaatgtattgttaaatcttcaattattattaaatgagacccattatagaaataaggaacataaatttaggttcaccaaacaaaattagtacttaaaaaaatgacaccaatttaataatttaatcaaataaaatgacatttatttaattcatcaataataaaaagtaccgtaatattattaaatgttcaattaatagtgttatcataatctgtacataaaaagcaatcacttttctatataattgagagattaaattaatatttgtttaaactatcactgaatccatttaccgaccttttatatgccattttttatatatatttgtatgctttaaaatcacggaaaaaaaattatagaaaattctaacatgatcatttcaatcatcaatttaaacaactctaaatcgaaaacattgaataaactagaaatgatacctgggaatttggaacaagagacattccgcaaaagaaaaaatatgttgaataattgaaacggtgacaagaaaagaggaataatgaaaatcaataaaacagagatggggggttattgttattcgaggagacgagtgaaatgagtgagtgaggggggtgtaactggaaagcaagaaaaagcacaagagtgccagctatttccaacaacaaacgtggcccgtggatgcgatattggtaacggacggcgaggatggaaggacgtgcaatttgcgcttcatttgaggcgaatttcatttgaccagacctttcttttttaaaccacagggcgggtacctcagccacacacatacatcatcaaaaaacacacacgacacactcccatacacacacgttgtctcgcacacattccttcattccgcaggtatagccacgttctctcttccctctttcatccccggtgataagaacaagcacccaccgtttaacgctaattttatgtgtttttgttttttttttttttttgcagcagcaaacatctttaccttaaacgacaaca

SEQ ID NO: 414 - DNA, 1490 bp, Glycine max
  source 1..1490: mol_type = other DNA
gaaacaatgcctaaacattgtactaaaattcacatcaagcaaaatacaatttggtgaacattaattgtaccataaaacatctatgtttgaataaagatatacatcctcaacctaaatttacaagctaatataaaataataaaataaaaaacaaatacataaaactgcataaacgtctcttaatctcgatcgtgtgagtaaaatggaacatgtataaatgttacatgttatcctcactatcattcgctatgactaatagtctaatactaatactaataatgataataatgcttgtttttaaaaatagtaataataaaacaagttcacaagttaggtcaatgagtgcataaatgaaaacctgtgacccaaatccaaagtcaacgaatttgaggattttgcttcttgcatttcttttttttttcttcctgcacttccaaaaatactcgaatggacacaactacccttacaagcaccaaccaaaattcaacacaaatcgataacgcctactcccaccaaaatggaaaccattttcaccaacaacaacaaggttcgaaaggtagtaacaaggaagagaaaaggaaaagggttgcaatggagatgtccgaagtagaagaataaaacactatcaatgtaacccactactttgttcttgctaacatgcatcaacaaactaaactaaatgcaatgtacaatacatggcaaaaaataatgtcaaatcataagaaattcaagcacaaatattgccctaaaaattaaattcaacaaagaagtttctatattgcagtaataatttttcactttgccccctcctcttagactatgcgcggtggaccaaagctaaagttagaagggctaggcaagacaaaagcattatgttgaggtcccaaattaggataaaaggaaaagtgagaaggaagcaaggagtgtcaccctattttgaagcagctattatggaatgtgaaaattagattaagaaatatgtattctggaataggtttatagatttcttatctttattcactaataactatttcaaaatgtaaaaattatatatttatctaaacccactagatactcaatccaaactaattgacttgattaagacggaatttgaattcgtgggaaattcatactaggtttggggcaaggggtggaataagaagaaaaaaatggataaggatgtcatttggtgtgggtatataggcaaccagaaaagggctgggtatttttgagtgtgtgagagagcgagcgagcgagcagtttcaaagagaggatttgggattgggaaggcgagggattgcgctgcgtctcttcctcttctctttcgattcatccctcattcataattttccaatccaacaacctcagcctcatactcacacatacacacgtctctctctctctactcttttttcctctctatttcccttttcactttctctttcatttctagggttccgttctgatccctctttccctttcagatctgaa

SEQ ID NO: 415 - DNA, 186 bp, Glycine max
  source 1..186: mol_type = other DNA
atggcgtcttcgtcgttctcagtcacatctccagctgctgctgcttccgtctatgcagtcactcaaacctcctcgcacttcccaatccaaaaccgctctcgcagagtttctttccgtctctctgctaagcccaaacttcgctttctctccaagcctagtcgcagtagctaccctgtggtgaaagca

SEQ ID NO: 416 - protein, 63 aa, synthetic construct
MASSSFSVTSPAAAASVYAVTQTSSHFPIQNRSRRVSFRLSAKPKLRFLSKPSRSSYPVVKAG

SEQ ID NO: 417 - protein, 518 aa, synthetic construct
MASSSFSVTSPAAAASVYAVTQTSSHFPIQNRSRRVSFRLSAKPKLRFLSKPSRSSYPVVKAGMLHGASSRPATARKSSGLSGTVRIPGDKSISHRSFMFGGLASGETRITGLLEGEDVINTGKAMQAMGARIRKEGDTWIIDGVGNGGLLAPEAPLDFGNAATGCRLTMGLVGVYDFDSTFIGDASLTKRPMGRVLNPLREMGVQVKSEDGDRLPVTLRGPKTPTPITYRVPMASAQVKSAVLLAGLNTPGITTVIEPIMTRDHTEKMLQGFGANLTVETDADGVRTIRLEGRGKLTGQVIDVPGDPSSTAFPLVAALLVPGSDVTILNVLMNPTRTGLILTLQEMGADIEVINPRLAGGEDVADLRVRSSTLKGVTVPEDRAPSMIDEYPILAVAAAFAEGATVMNGLEELRVKESDRLSAVANGLKLNGVDCDEGETSLVVRGRPDGKGLGNASGAAVATHLDHRIAMSFLVMGLVSENPVTVDDATMIATSFPEFMDLMAGLGAKIELSDTKAA

SEQ ID NO: 418 - DNA, 109 bp, synthetic construct
  source 1..109: mol_type = other DNA
gatatcatcttctctctctctttctgaagtgaactgttgttgttgtgctctttggtttcatcgagagagaacctaaacccgatctgaaccaataacaataagaagacga

SEQ ID NO: 419 - DNA, 168 bp, synthetic construct
  source 1..168: mol_type = other DNA
acaataaactctgttttttcttctgatccaagcatatctgtttccatttttcttgtctctgtaatattattagaaaccgagagtgtttgtttgcgtgtaactgaactgagcgagttttgagatgcaatcatttgagttcgattgagagaaatgaatgtgtagggccca

SEQ ID NO: 420 - DNA, 1830 bp, synthetic construct
  source 1..1830: mol_type = other DNA
gatatcatcttctctctctctttctgaagtgaactgttgttgttgtgctctttggtttcatcgagagagaacctaaacccgatctgaaccaataacaataagaagacgaatggcgtcttcgtcgttctcagtcacatctccagctgctgctgcttccgtctatgcagtcactcaaacctcctcgcacttcccaatccaaaaccgctctcgcagagtttctttccgtctctctgctaagcccaaacttcgctttctctccaagcctagtcgcagtagctaccctgtggtgaaagcaggcatgcttcatggtgcaagcagccgtccagcaaccgctcgcaaatcctctggactttctggaaccgttcgcattccaggagacaagtctatctctcatcgttctttcatgttcggaggtctcgctagtggtgaaactcgtatcactggacttctggaaggtgaggacgttattaatactggtaaggcaatgcaagctatgggtgctagaatccgtaaggaaggagacacctggatcattgatggagttggtaatggaggtcttcttgcacctgaggcaccactcgatttcggtaatgctgctacaggatgccgtcttaccatgggacttgttggtgtttacgatttcgacagcaccttcattggagatgcatctctcacaaagcgtcctatgggacgagtgttgaacccacttcgtgaaatgggagtgcaggtgaaatctgaagacggtgaccgtcttccagttaccttgcgtggacctaagactcctactccaatcacctaccgtgtgccaatggcatctgcacaggtgaagtcagctgtgctgctcgcaggtctcaacactccaggtatcactacagtcatcgagcctatcatgactcgtgatcatactgaaaagatgctgcagggatttggagctaaccttaccgttgagactgatgctgacggagtgcgcaccatccgtctggaaggtcgtggtaagctcaccggtcaagtcatcgacgtgcctggagacccatcctctactgcattcccactggttgcagctctgcttgttccaggctccgacgtcaccatcctcaacgtgctgatgaaccctactcgcactggactcatcctgactctgcaggaaatgggtgctgacatcgaagtcatcaaccctcgtcttgcaggaggtgaagacgtggctgacctgcgcgttcgctcatccactctgaagggtgtcacagtgcctgaagaccgcgctccttctatgatcgacgaatatcctattctcgctgttgcagctgccttcgctgaaggtgctaccgtgatgaacggtctggaagaacttcgcgtcaaggaaagcgaccgtctctcagctgtcgccaatggtctcaagctcaatggagtggattgcgatgagggtgagacttcactcgtcgtgcgtggacgtcctgacggtaagggactcggtaacgcatctggagctgcagtcgctacccatctcgatcaccgcatcgctatgagcttcctcgtcatgggactcgtgtctgaaaaccctgtcacagtggacgatgccacgatgatcgccacgagcttcccagagttcatggacctgatggctggacttggagctaagatcgaactctccgatacgaaggctgcctgatgaacaataaactctgttttttcttctgatccaagcatatctgtttccatttttcttgtctctgtaatattattagaaaccgagagtgtttgtttgcgtgtaactgaactgagcgagttttgagatgcaatcatttgagttcgattgagagaaatgaatgtgta

SEQ ID NO: 421 - DNA, 2716 bp, synthetic construct
  source 1..2716: mol_type = other DNA
tcaaaaaaatttctggttatgcatctctttcttgaaaaaataatcatataatcacatcaaaaagagtcaattatcatcttcattatcttaatataatcaatcaataattcaatttaaaaggtaaattaaagtaagcaatgtagacccaaaaaaaaaagtctgcttttgtttcaaaacatataaggacagtgaaagggtttgtgcataaatgttgttgcttcatctttctcataacattagctatgagattatgaaagtgaagatataaaacaaacacctaaaagtgaaaagtacaagacaccaaatccttcattttcatctcttacacaaccacactaagttaccaaaaaacagaatctgttctttttttgccttcttgcagatttcttcagagtcaaagacacataaagatttataattgagttgtgagttttggaggccatggacgtaggagagagcaatgagagggtaaaagacgattctgcccttcaagcttcaccgaggagtcctctgagttctatagatcttgcaattgatggagctatgaatgcttctattgagcagttgtatcataacgtttgtgaaatggagagttctgatgatcagtctccgtccagggcgagttttatttcgtatggagctgaatctaggattgatttggagttgaggcatttggttggagatgtaggagaagaaggagagagcaagaaagagattatcttggagaagaaggaagaaagtaatggagaaggtagcttgagtcagaagaaacctctttcgaatggtaagaaggttgcgaaaacgagtcctaataatccgaagatgccgggttcgaggatctcttcgaggaaatcaccggatttggggaaggtttctgttgatgaggagagtcctgagcttggtgtggtgttgttgaagcaagccagagagttggtttcttcaggtgagaatttaaacaaggctcttgatttagcgttgagagcggtgaaagtgtttgagaaatgtggggaaggagagaaacaacttgggttgaatttggtgatgtctttgcatatcttggcagcgatatatgcagggttagggagatacaatgacgctgtgcctgttcttgaacgttctatcgagataccgatgattgaagatggtgaggatcacgcgttggcgaaatttgcagggtgtatgcagcttggtgacatgtatggtttgatgggtcaagttgaaaattcgattatgctatacaccgcgggtttggagattcaaagacaagttcttggagaatcggatgcacgagttggcgaaacttgtaggtacttagcggaagctcatgttcaagcaatgcagtttgaagaagcctcaaggctttgtcaaatggcattggacattcacaaagaaaacggtgctgccgctacagcttctattgaagaagctgcggatagaaaactgatgggacttatctgcgatgcgaaaggtgattatgaagttgcgcttgagcattatgttttagcgagcatggcaatgtcatctcagaaccatagagaagatgttgctgctgtagattgcagtattggtgatgcttacatgtcgctagctaggtttgatgaagcgatattcgcataccagaaggctttagctgtgtttaagcaaggaaaaggtgagactcattcctctgttgctttggtttacgttaggcttgctgacttgtacaacaagattgggaaaacacgcgattccaaatcgtactgcgaaaacgctctcaagatttacctaaaaccgactccaggaactcctatggaagaggttgcgactggttttatagagatttctgcgatatatcagtcaatgaatgaacttgatcaagctcttaagttgttgagacgggcgttgaagatatatgcaaacgctccaggtcaacagaacacgattgcaggtattgaagctcaaatgggtgtggttacttatatgatgggaaattactccgagtcctacgacatattcaagagcgcgatatcaaagttccgcaatagcggagagaaaaaaaccgctcttttcgggattgctttgaatcagatgggactagcttgcgttcagcgttacgcgatcaatgaagctgcagatttgtttgaagaagcgaaaactattcttgagaaagagtgtggaccgtaccatcccgatacattagcggtttacagtaaccttgctggaacgtacgacgcaatgggaaggttagatgatgctatagagatattggagtatgttgttgggacaagagaagagaagctcgggacggcaaatcccgaggttgaggacgagaagcagaggcttgctgcgttgttgaaagaagctggaagaggaaggagtaaaagaaacagagcacttcttacccttttggacaacaaccctgaaattgcaaatggacagagaccggtttattgattaaccggattattgtccggtctaaaatgtatatatatacaaaatacaagttcgaatacggtacttacacggtcgagggagaaggaaaaaaatgaagaggctttatgttttctagttttataaaaagtgaaggaaaaaaaaaaaaatcttgcatttgttttctttataaataaaatgtaaagagtaaaacgcaattgatttggtcgttttgtaatgtgatttacattgaaattttggagtttaaaaatctccttgatggcagtttctctaactttgagcactg

SEQ ID NO: 422 - protein, 663 aa, Arabidopsis thaliana
MDVGESNERVKDDSALQASPRSPLSSIDLAIDGAMNASIEQLYHNVCEMESSDDQSPSRASFISYGAESRIDLELRHLVGDVGEEGESKKEIILEKKEESNGEGSLSQKKPLSNGKKVAKTSPNNPKMPGSRISSRKSPDLGKVSVDEESPELGVVLLKQARELVSSGENLNKALDLALRAVKVFEKCGEGEKQLGLNLVMSLHILAAIYAGLGRYNDAVPVLERSIEIPMIEDGEDHALAKFAGCMQLGDMYGLMGQVENSIMLYTAGLEIQRQVLGESDARVGETCRYLAEAHVQAMQFEEASRLCQMALDIHKENGAAATASIEEAADRKLMGLICDAKGDYEVALEHYVLASMAMSSQNHREDVAAVDCSIGDAYMSLARFDEAIFAYQKALAVFKQGKGETHSSVALVYVRLADLYNKIGKTRDSKSYCENALKIYLKPTPGTPMEEVATGFIEISAIYQSMNELDQALKLLRRALKIYANAPGQQNTIAGIEAQMGVVTYMMGNYSESYDIFKSAISKFRNSGEKKTALFGIALNQMGLACVQRYAINEAADLFEEAKTILEKECGPYHPDTLAVYSNLAGTYDAMGRLDDAIEILEYVVGTREEKLGTANPEVEDEKQRLAALLKEAGRGRSKRNRALLTLLDNNPEIANGQRPVY

SEQ ID NO: 423 - DNA, 174 bp, Arabidopsis thaliana
  source 1..174: mol_type = other DNA
atggccgccgcagtttccaccgtcggtgccatcaacagagctccgttgagcttgaacgggtcaggatcaggagctgtatcagccccagcttcaaccttcttgggaaagaaagttgtaactgtgtcgagattcgcacagagcaacaagaagagcaacggatcattcaaggtgttg

SEQ ID NO: 424 - protein, 59 aa, synthetic construct
MAAAVSTVGAINRAPLSLNGSGSGAVSAPASTFLGKKVVTVSRFAQSNKKSNGSFKVLG

SEQ ID NO: 425 - DNA, 1953 bp, synthetic construct
  source 1..1953: mol_type = other DNA
tttcatggtccgtagacttttatcaggtttttaattaggtttctgaattgaaattatatcttatttagtatatataaagaaaataattattttaacctattatatcaaaacagtgaatcctttaactctaaaactaatcctatctttattttacaaaaaatactaaacctatctattattttttttaaatgttaaacccatcatctaggatagttttaaattcgcataaaaaaagatagttttaaattagataggattttttttatatcaaaacattgaatccttaaactctataactaatcctatctttatttttaaaaaaatactaaacctatctaatatttttttaaaggataaacctatctaatctaagatagttttaaattagataggatttttttatatcaaaacagtgaatccttaaactctaaaattaatcctatctttatttaaaactatctaatcttttttttaaggataaacctatctaatctaagatagttttaaattagataggtttagtaaacctatatgaattttatttttttatgattaaaaaaaaatcttagatatgattttattttaatcccagcatttgccacgttcgaacgtgagccaaaacgatgtcgttacaatatcttaacctagccgaaacgatgtcgtggtaactcataatatcgcagccttctgtttcgtccttgcccaatgccaactggactacgccgaacccacaaaacccgacatccgcgcgaaccaaagcgcgtgacgccaaattgctcaaaccacaaaggaaacaaaggcgcgttaataacacgcgctatcccacgcgtgttaagcacagtaacgttcaacaaagagaagcagggtataatgggaaaccaaagagaaacctaaggccattatgggaaacaaaaagtagctcactcattataaaattcaagtaaccctagttttcatcatcactctgctgcctcgctctgtttctgtctctgtgtttgcggctgaggattccgaacgagcgaccttcttcgtttctcgcaaaggtaacagcctctgctcttgtctcttccattcgatccatgcctgtctcttctttacgatgatgtttcttcggtgtatgtttatttatttatttatttatgctttatgttgtgaatgttcggttgttttgtttcgctttgcttttgtggattctattggtttttgaatcagttaatcggaagagattttcgagttgttttgtgttttggaggtgaatctttttgttgaggtcgcagatctgttgattttgtgtcataaacgtgcgactctgtttgattttttacgaggttatgacgttttggttgttttattatggatctgttaaggcagaaccatgatttatgtttatgttcgtttacacgattaaattttcttgtaacacgatgaagtttttttaaacacgttgaaggagtcttgttgatatgaatttgtcgattgtttttttgtggttttgttctcacgttatcaagcgtaatcttttactatgtacgcgaacatatctagatctagcagagctttttttttttttaattctttgtgaagcttttgaaatatgaaatttgtttttcaaattttttttaatttattgaaaacactgtggatactgaataaggttctatgtatgatgcgaaccatgtttgatatgtttgtttttgttgttccatatggatttttctgttagatttccatatgcttttgagtttgtttttgctgttacagattgatttactttttagaatatttctcttggctttcactgttttagaaattttttgttattggtaactataaatgtgtgaatttggattatacctttaccttgttatttagttgtgtgataatttggtttatagttattttgagttctgactcgtgtttctttgaattgattccagtttaagtcatctcgag

SEQ ID NO: 426 - DNA, 2246 bp, synthetic construct
  source 1..2246: mol_type = other DNA
agaattttacttaaatctctactacataaaataataaaaatataatatattgcatgatatttagtaactgtaaaaaaaaatataaatattacatgatatttaataactgtaaacaaataaaaatataatatattgcatgatatttagtaatagtaaactaaataataaaaaattatgacatggaaacttttataaaaaaagaaatactataatttttaagatagacaatgataggaaaaaaaattaaaaagtttcaacgactacacatttaaaatttaaaattaataattgctttctacaaaatgagaatatattagtttacaaaagtaaaatagttaccaaatttattgaaaaaacacattttttttattcaaaattatatttttctttttttagttttatattaataataacaaatcaaaattagtgatttatcattattgagaataaaaaagttgttttaatataattatatttattatgttataaatttaaatttgtttaatactttttttattataattaaatagaaaaaataaaaattaaattacattactttttaaagttcttttaccaactcgatgaaattattatatttgacaaaattatttttaatatttgatgcaaatttatttttttgcaaaattaattaattaaagaaaaatacattaaaataaagataatacataaatataaaaatgatatgatgtaaaactaatctattataccatacttaaaagatttgttttggaaactgcactaaactacgtcgttttggtgggcgcataattaaaccctaaccagggcttcatcacgacactctcggggcctcccgcacagcaagcgaaagcaaaaaggatccaaatggaactacttaaaataataagggtattttcgtcaacagaggaaaaaacttgtagcctataaataaaccctctaaccctcgtttcctcacttctcttcactctatcattctcctttcttctcttgcggctagggttttagcgcagcttcttctaggtacgttttcttatgccgtttcattagttttaattcttctattcatgcttatcctattggattgtgttgcctgctgaatatggttttctatatgttgtttatgtcttcaatatatctctgttttgttgatgaattttaattgtttcacatgaatttcatgtttttttcgaatttttgtctgagttattggttataatcggtaagatgtcttcaaaaaatgattttttttttcgtttggttttgtacctttgaaatactcagatttgatttgatttttgtggatttgtgtgttttttatattcaaatccatggatccagatctggttaaacttttgctttttgtttaagatttttctcaattctgatggatggatctataaccttttggttttaatcgattcaagtcgcattttttttttgagatggcatgataaatgtgtggtttaacccactggttttaattggttcaagttgcggattttacgggatgacatgataattgtttggtttaaccttttattttaatcgattcaagtcgctgattttacgagatgacatgataaatgtgtggtttaaccttttggttttaatcgattcaagttgctgactttacgagatagacatataaatgcgtgggtgtcttgaatacctttttcggatgtggtgtagtaacatatgtgtgggtgacttgaataccttgtttgcatgtgggtgtcttgaataccttgtttttgtggtgtagtaacttatgtgtgggtgtcttgaatacattgtttgcatgtggcgtagtaacttaattttgacgtgtcaatgcgtcaatatttttatttctgtatgtaatctgttttgtgttccctttgctctaatgaattatacctactaatagcttgttgtctgcgttgcttatagttgtatgcctgctttatatgaagtttgtgtgcaaggaatttggagattacccgatattttaatgttttaatggttatacatgtcttgtaatataaagcttgttgtgtgatttcttcttatatattgccgttacttttaattggtatgcataatgtaaactttgtttttagatattacccaatatattatttatgattatccatggtttgttgtatatgcgaacccatctcctttgtgtgatgtggctattttttggtttaagatgatgctaatgtatgcatttagttgttgctttttgcagatactcaaacgcagtt

SEQ ID NO: 427 - DNA, 351 bp, synthetic construct
  source 1..351: mol_type = other DNA
aatctacttcagattcttgttcttgtggtctttttctgttgttgtgtttgatgttcagatgtaccagtaccgttgtgggttttaatttggatgcattgtttttatgcttcgctgcttctgttacagacccaaacggaatggcaatatatattttgaccattgtctgaactactattttgttttagctgtgttaattattgactttttttcttttcgattaagtgtggtactttttcggaacttaagggccaaaaatttgattgtagaggagaggagttttgagatccccttcctttaggaaatgagaaaaaaaaatagaaaagaaacgagatttttaaaattcttactagt

SEQ ID NO: 428 - DNA, 562 bp, synthetic construct
  source 1..562: mol_type = other DNA
aacaatgagcccagaaagaagacctgctgatattagacgtgctactgaagctgacatgccagcagtctgtactattgttaaccattacattgagacttctactgttaacttcagaactgaaccacaagaacctcaagagtggactgatgatcttgttagacttagagagagatatccatggcttgttgctgaagttgatggagaagttgctggaattgcttatgctggaccatggaaggctagaaacgcttatgattggactgctgaatctactgtttacgtgtctccaagacatcaaagaactggacttggatctactctttacactcatcttcttaagtctcttgaagctcaaggattcaagtctgttgttgctgttattggacttccaaacgatccatctgttagaatgcatgaagctcttggatatgctccaagaggaatgcttagagctgctggattcaagcatggaaactggcatgatgttggattctggcaacttgatttctctcttccagttccaccaagaccagttcttccagttactgagatttgattcgaa

SEQ ID NO: 429 - protein, 183 aa, synthetic construct
MSPERRPADIRRATEADMPAVCTIVNHYIETSTVNFRTEPQEPQEWTDDLVRLRERYPWLVAEVDGEVAGIAYAGPWKARNAYDWTAESTVYVSPRHQRTGLGSTLYTHLLKSLEAQGFKSVVAVIGLPNDPSVRMHEALGYAPRGMLRAAGFKHGNWHDVGFWQLDFSLPVPPRPVLPVTEI

SEQ ID NO: 430 - DNA, 325 bp, synthetic construct
  source 1..325: mol_type = other DNA
ggtttgagtttgagttcacatatgggaaaataggattgtcaattctagttctttgtttctctaatgtgtctcagtttataagatttagtttgttttcatttttcaattgtatatttgtggggtcaggaattttgatctctgtacgaagtaaattatgtgaggaacatcttttgcatgattatgcttttacaaatttgggatggatgcaatgtcattctgaacatgatttcgtttttttttaataatcaacatcatatatattgaacaaggcttttaaaacagaacccgtgtgaaggtatatatacaagattatataataattaag

SEQ ID NO: 431 - DNA, 1384 bp, synthetic construct
  source 1..1384: mol_type = other DNA
ctagtgggtgaataatcatgtattgtgtattgtgagattgtagagttcaaaataaagattatacataattatgagtggttatataggatattatttttttttgcttactttttttccccttcaatttgtatccttttattatagttgaaaaaatataataagaaattttaaaataattaaaggataaagaagtctatgtaaaagttgatatcgaaaataattttcaaatcaggtatctcctttatctattggtataaattatgttgatattttttcatttttgttatcattggcctttgtttatgctaagtgggatgctaaaagtcatccaaacggataaattgctttttatttaaattttaaaaattaaaacttctaagtttttgaattttaaaattaattaaccaaagtcttaattaaaactgtccattaatttaaattttaagaatttaccaaaattgtcaactaaaaccgtacaattttttaattttaaaaaatgtgtgaatttgttaactatttttttaacttttaacaatctaccaatttgttaatttttaaaaatataccaatttattagtgcttattttttaaattgtaaaatcctagcaatttgttaattaaaccaacgtaaactaaacaattgttatttaaaaaaaaatatttttttttaattttaaaattcaaactattccaattttctattggctttttcttatactgtccaaattttattttaattttaataaaataacaattaactacaaaccaaatttttaaacaattattaagagattcatatttgttaatgattgtatcggataaaataaattttttaacctttttaaaaatcaacatcgtaaattaattattattatttagaaataaaaatatctttttaaatttaagattttattccatcccacaattttcttagttttttcttagataaatcagtattacttaaatattatcattttttttttaaaataccaaactatcccactacttcctttaattttatttttatcctaaaaaaacttaaaatgtgttttttttaaagaaatataaaaaatatttttccaacaataaaataaatataagctaatgcctttttttttaatttatataaaatataatacaaatatggatatacgggcgggcagagcggctgtgtttccgctagttttaataacagccttccaatttattacttgtatatcatatggctatcaaaacttgtgcaccgtgtgtgactacgctacttctacaccctataatccgtctccgtctccaacttaagaaaaaaaaaaaactacaacctttattttatttttctaatagtaaaaaattgtaaatatggaacagcagtgggccgcaatagaat

SEQ ID NO: 432 - DNA, 267 bp, synthetic construct
  source 1..267: mol_type = other DNA
ggatccgattgttttccatttgtttctgaattttggaattttattttagtataatactgtttttttttggggtcgcatatttatcattatgactgcctaaatgatctgccttttcatattattatgactgcttaaatcttgatgcattattttttgaatttgattttaattttgaaatgaagtgagtgatttatggctgaatttaagaaatttgatggaaatttataggtaaaatcagttttactttatcgataacttaatgttagc

SEQ ID NO: 433 - protein, 610 aa, synthetic construct
MDNNPNINECIPYNCLSNPEVEVLGGERIETGYTPIDISLSLTQFLLSEFVPGAGFVLGLVDIIWGIFGPSQWDAFLVQIEQLINQRIEEFARNQAISRLEGLSNLYQIYAESFREWEADPTNPALREEMRIQFNDMNSALTTAIPLFAVQNYQVPLLSVYVQAANLHLSVLRDVSVFGQRWGFDAATINSRYNDLTRLIGNYTDYAVRWYNTGLERVWGPDSRDWVRYNQFRRELTLTVLDIVALFPNYDSRRYPIRTVSQLTREIYTNPVLENFDGSFRGSAQGIERSIRSPHLMDILNSITIYTDAHRGYYYWSGHQIMASPVGFSGPEFTFPLYGTMGNAAPQQRIVAQLGQGVYRTLSSTLYRRPFNIGINNQQLSVLDGTEFAYGTSSNLPSAVYRKSGTVDSLDEIPPQNNNVPPRQGFSHRLSHVSMFRSGFSNSSVSIIRAPMFSWIHRSAEFNNIIASDSITQIPAVKGNFLFNGSVISGPGFTGGDLVRLNSSGNNIQNRGYIEVPIHFPSTSTRYRVRVRYASVTPIHLNVNWGNSSIFSNTVPATATSLDNLQSSDFGYFESANAFTSSLGNIVGVRNFSGTAGVIIDRFEFIPVTA

SEQ ID NO: 434 - protein, 613 aa, synthetic construct
MEENNQNQCIPYNCLSNPEEVLLDGERISTGNSSIDISLSLVQFLVSNFVPGGGFLVGLIDFVWGIVGPSQWDAFLVQIEQLINERIAEFARNAAIANLEGLGNNFNIYVEAFKEWEEDPNNPETRTRVIDRFRILDGLLERDIPSFRISGFEVPLLSVYAQAANLHLAILRDSVIFGERWGLTTINVNENYNRLIRHIDEYADHCANTYNRGLNNLPKSTYQDWITYNRLRRDLTLTVLDIAAFFPNYDNRRYPIQPVGQLTREVYTDPLINFNPQLQSVAQLPTFNVMESSRIRNPHLFDILNNLTIFTDWFSVGRNFYWGGHRVISSLIGGGNITSPIYGREANQEPPRSFTFNGPVFRTLSNPTLRLLQQPWPAPPFNLRGVEGVEFSTPTNSFTYRGRGTVDSLTELPPEDNSVPPREGYSHRLCHATFVQRSGTPFLTTGVVFSWTDRSATLTNTIDPERINQIPLVKGFRVWGGTSVITGPGFTGGDILRRNTFGDFVSLQVNINSPITQRYRLRFRYASSRDARVIVLTGAASTGVGGQVSVNMPLQKTMEIGENLTSRTFRYTDFSNPFSFRANPDIIGISEQPLFGAGSISSGELYIDKIEII

SEQ ID NO: 435 - protein, 644 aa, synthetic construct
MNPNNRSEHDTIKTTENNEVPTNHVQYPLAETPNPTLEDLNYKEFLRMTADNNTEALDSSTTKDVIQKGISVVGDLLGVVGFPFGGALVSFYTNFLNTIWPSEDPWKAFMEQVEALMDQKIADYAKNKALAELQGLQNNVEDYVSALSSWQKNPVSSRNPHSQGRIRELFSQAESHFRNSMPSFAISGYEVLFLTTYAQAANTHLFLLKDAQIYGEEWGYEKEDIAEFYKRQLKLTQEYTDHCVKWYNVGLDKLRGSSYESWVNFNRYRREMTLTVLDLIALFPLYDVRLYPKEVKTELTRDVLTDPIVGVNNLRGYGTTFSNIENYIRKPHLFDYLHRIQFHTRFQPGYYGNDSFNYWSGNYVSTRPSIGSNDIITSPFYGNKSSEPVQNLEFNGEKVYRAVANTNLAVWPSAVYSGVTKVEFSQYNDQTDEASTQTYDSKRNVGAVSWDSIDQLPPETTDEPLEKGYSHQLNYVMCFLMQGSRGTIPVLTWTHKSVDFFNMIDSKKITQLPLVKAYKLQSGASVVAGPRFTGGDIIQCTENGSAATIYVTPDVSYSQKYRARIHYASTSQITFTLSLDGAPFNQYYFDKTINKGDTLTYNSFNLASFSTPFELSGNNLQIGVTGLSAGDKVYIDKIEFIPVN

SEQ ID NO: 436 - DNA, 1833 bp, synthetic construct
  source 1..1833: mol_type = other DNA
atggataacaacccaaacatcaacgagtgcattccatacaactgcctctctaacccagaggtggaggtgctcggcggcgagaggattgagaccggctacaccccaattgatatctctctctctctcacccagttcctcctctctgagttcgtgccaggcgctggcttcgtgctcggcctcgtggatatcatctggggcatcttcggcccatctcagtgggatgctttcctcgtgcagattgagcagctcatcaaccagaggattgaggagttcgctaggaaccaggctatctctaggcttgagggcctctctaacctctaccagatttacgctgagtctttcagggagtgggaggctgatccaaccaacccagctctcagggaggagatgaggattcagttcaacgatatgaactctgctctcaccaccgctattccactcttcgctgtgcagaactaccaggtgccactcctctctgtgtacgtgcaggctgctaacctccacctctctgtgctcagggatgtgtctgtgttcggccagaggtggggcttcgatgctgctaccatcaactctaggtacaacgatctcaccaggctcattggcaactacaccgattacgctgtgaggtggtacaacaccggccttgagagggtgtggggcccagattctagggattgggtgaggtacaaccagttcaggagggaactcaccctcaccgtgctcgatattgtggctctcttcccaaactacgattctaggagatacccaatcaggaccgtgtctcagctcaccagggagatttacaccaacccagtgcttgagaacttcgatggctctttcaggggctctgctcagggcattgagaggtctatcaggtctccacacctcatggatattctcaactctatcaccatctacaccgatgctcacaggggctactactactggtctggccaccagatcatggcttctccagtgggcttctctggcccagagttcaccttcccactctacggcactatgggcaacgctgctccacagcagaggattgtggctcagctcggccagggcgtgtacaggaccctctcttctaccctctacaggaggccattcaacattggcatcaacaaccagcagctctctgtgctcgatggcaccgagttcgcttacggcacctcttctaacctcccatctgctgtgtacaggaagtctggcaccgtggattctctcgatgagattccaccacagaacaacaacgtgccaccaaggcagggcttctctcacaggctctctcacgtgtctatgttcaggtctggcttctctaactcttctgtgtctatcatcagggctccaatgttctcttggattcacaggtctgctgagttcaacaacatcattgcttctgattctatcacccagattcctgctgtgaagggcaacttcctcttcaacggctctgtgatctctggcccaggcttcaccggcggcgatctcgtgaggctcaactcttctggcaacaacattcagaacaggggctacattgaggtgccaattcacttcccatctacctctaccaggtacagggtgagggtgaggtacgcttctgtgaccccaattcacctcaacgtgaactggggcaactcttctatcttctctaacaccgtgccagctaccgctacctctctcgataacctccagtcttctgatttcggctacttcgagtctgctaacgctttcacctcttctctcggcaacattgtgggcgtgaggaacttctctggcaccgctggcgtgatcattgataggttcgagttcattccagtgaccgcttga

SEQ ID NO: 437 - DNA, 1842 bp, synthetic construct
  source 1..1842: mol_type = other DNA
atggaggagaacaaccagaaccagtgcattccatacaactgcctctctaacccagaggaggtgctcctcgatggcgagaggatctctaccggcaactcttctattgatatctctctctctctcgtgcagttcctcgtgtctaacttcgtgccaggcggcggcttcctcgtgggcctcattgatttcgtgtggggcattgtgggcccatctcagtgggatgctttcctcgtgcagattgagcagctcatcaacgagaggattgctgagttcgctaggaacgctgctattgctaaccttgagggcctcggcaacaacttcaacatctacgtggaggctttcaaggagtgggaggaagatccaaacaacccagagaccaggaccagggtgattgataggttcaggattctcgatggcctccttgagagggatattccatctttcaggatctctggcttcgaggtgccactcctctctgtgtacgctcaggctgctaacctccacctcgctattctcagggattctgtgatcttcggcgagaggtggggcctcaccaccatcaacgtgaacgagaactacaacaggctcatcaggcacattgatgagtacgctgatcactgcgctaacacctacaacaggggcctcaacaacctcccaaagtctacctaccaggattggatcacctacaacaggctcaggagggatctcaccctcaccgtgctcgatattgctgctttcttcccaaactacgataacaggaggtatccaattcagccagtgggccagctcaccagggaggtgtacaccgatccactcatcaacttcaacccacagctccagtctgtggctcagctcccaaccttcaacgtgatggagtcttctaggatcaggaacccacacctcttcgatattctcaacaacctcaccatcttcaccgattggttctctgtgggcaggaacttctactggggcggccacagggtgatctcttctctcattggcggcggcaacattacctctccaatttacggcagggaggctaaccaggagccaccaaggtctttcaccttcaacggcccagtgttcaggaccctctctaacccaaccctcaggctcctccagcagccttggccagctccaccattcaacctcaggggcgtggagggcgtggagttctctaccccaaccaactctttcacctacaggggcaggggcaccgtggattctctcaccgaactcccaccagaggataactctgtgccaccaagggagggctactctcacaggctctgccacgctaccttcgtgcagaggtctggcaccccattcctcaccaccggcgtggtgttctcttggaccgataggtctgctaccctcaccaacaccattgatccagagaggatcaaccagattccactcgtgaagggcttcagggtgtggggcggcacctctgtgattaccggcccaggcttcaccggcggcgatattctcaggaggaacaccttcggcgatttcgtgtctctccaggtgaacatcaactctccaattacccagaggtacaggctcaggttcaggtacgcttcttctagggatgctagggtgattgtgctcaccggcgctgcttctaccggcgtgggcggccaggtgtctgtgaacatgccactccagaagactatggagattggcgagaacctcacctctaggaccttcaggtacaccgatttctctaacccattctctttcagggctaacccagatatcattggcatctctgagcagccactcttcggcgctggctctatttcttctggcgaactctacattgataagattgagatcatttga

SEQ ID NO: 438 - DNA, 1935 bp, synthetic construct
  source 1..1935: mol_type = other DNA
atgaacccaaacaacaggtctgagcacgataccatcaagaccaccgagaacaacgaggtgccaaccaaccacgtgcagtacccactcgctgagaccccaaacccaacccttgaggatctcaactacaaggagttcctcaggatgaccgctgataacaacaccgaggctctcgattcttctaccaccaaggatgtgattcagaagggcatttctgtggtgggcgatctcctcggcgtggtgggcttcccattcggcggcgctctcgtgtctttctacaccaacttcctcaacaccatttggccatctgaagatccttggaaggctttcatggagcaggtggaggctctcatggatcagaagattgctgattacgctaagaacaaggctctcgctgaactccagggcctccagaacaacgtggaggattacgtgtctgctctctcttcttggcagaagaacccagtgtcttctaggaacccacactctcagggcaggattagggaactcttctctcaggctgagtctcacttcaggaactctatgccatctttcgctatctctggctacgaggtgctcttcctcaccacctacgctcaggctgctaacacccacctcttcctcctcaaggatgctcagatttacggcgaggagtggggctacgagaaggaggatattgctgagttctacaagaggcagctcaagctcacccaggagtacaccgatcactgcgtgaagtggtacaacgtgggcctcgataagctcaggggctcttcttacgagtcttgggtgaacttcaacaggtacaggagggagatgaccctcaccgtgctcgatctcattgctctcttcccactctacgatgtgaggctctacccaaaggaggtgaagaccgaactcaccagggatgtgctcaccgatccaattgtgggcgtgaacaacctcaggggctacggcaccaccttctctaacattgagaactacatcaggaagccacacctcttcgattacctccacaggattcagttccacaccaggttccagccaggctactacggcaacgattctttcaactactggtctggcaactacgtgtctaccaggccatctattggctctaacgatatcattacctctccattctacggcaacaagtcttctgagccagtgcagaaccttgagttcaacggcgagaaggtgtacagggctgtggctaacaccaacctcgctgtgtggccatctgctgtgtactctggcgtgaccaaggtggagttctctcagtacaacgatcagaccgatgaggcttctacccagacctacgattctaagaggaacgtgggcgctgtgtcttgggattctattgatcagctcccaccagagaccaccgatgagccacttgagaagggctactctcaccagctcaactacgtgatgtgcttcctcatgcagggctctaggggcaccattccagtgctcacctggacccacaagtctgtggatttcttcaacatgattgattctaagaagatcacccagctcccactcgtgaaggcttacaagctccagtctggcgcttctgtggtggctggcccaaggttcaccggcggcgatatcattcaatgcaccgagaacggctctgctgctaccatttacgtgaccccagatgtgtcttactctcagaagtacagggctaggattcactacgcttctacctctcagatcaccttcaccctctctctcgatggcgctccattcaaccagtactacttcgataagaccatcaacaagggcgataccctcacctacaactctttcaacctcgcttctttctctaccccattcgaactctctggcaacaacctccagattggcgtgaccggcctctctgctggcgataaggtgtacattgataagattgagttcattccagtgaactga

SEQ ID NO: 439 - DNA, 62 bp, synthetic construct
  source 1..62: mol_type = other DNA
tgagcagaaacttggatatctggcagcagaaaaacaagtagttgagaactaagaagaaggaa

SEQ ID NO: 440 - DNA, 50 bp, synthetic construct
  source 1..50: mol_type = other DNA
gtcattgaaaaatttgcaaagcatctgtagccaccccactttgtttgttg

SEQ ID NO: 441 - protein, 1917 aa, synthetic construct
MDNNPNINECIPYNCLSNPEVEVLGGERIETGYTPIDISLSLTQFLLSEFVPGAGFVLGLVDIIWGIFGPSQWDAFLVQIEQLINQRIEEFARNQAISRLEGLSNLYQIYAESFREWEADPTNPALREEMRIQFNDMNSALTTAIPLFAVQNYQVPLLSVYVQAANLHLSVLRDVSVFGQRWGFDAATINSRYNDLTRLIGNYTDYAVRWYNTGLERVWGPDSRDWVRYNQFRRELTLTVLDIVALFPNYDSRRYPIRTVSQLTREIYTNPVLENFDGSFRGSAQGIERSIRSPHLMDILNSITIYTDAHRGYYYWSGHQIMASPVGFSGPEFTFPLYGTMGNAAPQQRIVAQLGQGVYRTLSSTLYRRPFNIGINNQQLSVLDGTEFAYGTSSNLPSAVYRKSGTVDSLDEIPPQNNNVPPRQGFSHRLSHVSMFRSGFSNSSVSIIRAPMFSWIHRSAEFNNIIASDSITQIPAVKGNFLFNGSVISGPGFTGGDLVRLNSSGNNIQNRGYIEVPIHFPSTSTRYRVRVRYASVTPIHLNVNWGNSSIFSNTVPATATSLDNLQSSDFGYFESANAFTSSLGNIVGVRNFSGTAGVIIDRFEFIPVTAGSGAKQLLNFDLLKLAGDVESNPGPMEENNQNQCIPYNCLSNPEEVLLDGERISTGNSSIDISLSLVQFLVSNFVPGGGFLVGLIDFVWGIVGPSQWDAFLVQIEQLINERIAEFARNAAIANLEGLGNNFNIYVEAFKEWEEDPNNPETRTRVIDRFRILDGLLERDIPSFRISGFEVPLLSVYAQAANLHLAILRDSVIFGERWGLTTINVNENYNRLIRHIDEYADHCANTYNRGLNNLPKSTYQDWITYNRLRRDLTLTVLDIAAFFPNYDNRRYPIQPVGQLTREVYTDPLINFNPQLQSVAQLPTFNVMESSRIRNPHLFDILNNLTIFTDWFSVGRNFYWGGHRVISSLIGGGNITSPIYGREANQEPPRSFTFNGPVFRTLSNPTLRLLQQPWPAPPFNLRGVEGVEFSTPTNSFTYRGRGTVDSLTELPPEDNSVPPREGYSHRLCHATFVQRSGTPFLTTGVVFSWTDRSATLTNTIDPERINQIPLVKGFRVWGGTSVITGPGFTGGDILRRNTFGDFVSLQVNINSPITQRYRLRFRYASSRDARVIVLTGAASTGVGGQVSVNMPLQKTMEIGENLTSRTFRYTDFSNPFSFRANPDIIGISEQPLFGAGSISSGELYIDKIEIIGSGVKQTLNFDLLKLAGDVESNPGPMNPNNRSEHDTIKTTENNEVPTNHVQYPLAETPNPTLEDLNYKEFLRMTADNNTEALDSSTTKDVIQKGISVVGDLLGVVGFPFGGALVSFYTNFLNTIWPSEDPWKAFMEQVEALMDQKIADYAKNKALAELQGLQNNVEDYVSALSSWQKNPVSSRNPHSQGRIRELFSQAESHFRNSMPSFAISGYEVLFLTTYAQAANTHLFLLKDAQIYGEEWGYEKEDIAEFYKRQLKLTQEYTDHCVKWYNVGLDKLRGSSYESWVNFNRYRREMTLTVLDLIALFPLYDVRLYPKEVKTELTRDVLTDPIVGVNNLRGYGTTFSNIENYIRKPHLFDYLHRIQFHTRFQPGYYGNDSFNYWSGNYVSTRPSIGSNDIITSPFYGNKSSEPVQNLEFNGEKVYRAVANTNLAVWPSAVYSGVTKVEFSQYNDQTDEASTQTYDSKRNVGAVSWDSIDQLPPETTDEPLEKGYSHQLNYVMCFLMQGSRGTIPVLTWTHKSVDFFNMIDSKKITQLPLVKAYKLQSGASVVAGPRFTGGDIIQCTENGSAATIYVTPDVSYSQKYRARIHYASTSQITFTLSLDGAPFNQYYFDKTINKGDTLTYNSFNLASFSTPFELSGNNLQIGVTGLSAGDKVYIDKIEFIPVN

SEQ ID NO: 442 - DNA, 5880 bp, synthetic construct
  source 1..5880: mol_type = other DNA
actcgagtgagcagaaacttggatatctggcagcagaaaaacaagtagttgagaactaagaagaaggaaatggataacaacccaaacatcaacgagtgcattccatacaactgcctctctaacccagaggtggaggtgctcggcggcgagaggattgagaccggctacaccccaattgatatctctctctctctcacccagttcctcctctctgagttcgtgccaggcgctggcttcgtgctcggcctcgtggatatcatctggggcatcttcggcccatctcagtgggatgctttcctcgtgcagattgagcagctcatcaaccagaggattgaggagttcgctaggaaccaggctatctctaggcttgagggcctctctaacctctaccagatttacgctgagtctttcagggagtgggaggctgatccaaccaacccagctctcagggaggagatgaggattcagttcaacgatatgaactctgctctcaccaccgctattccactcttcgctgtgcagaactaccaggtgccactcctctctgtgtacgtgcaggctgctaacctccacctctctgtgctcagggatgtgtctgtgttcggccagaggtggggcttcgatgctgctaccatcaactctaggtacaacgatctcaccaggctcattggcaactacaccgattacgctgtgaggtggtacaacaccggccttgagagggtgtggggcccagattctagggattgggtgaggtacaaccagttcaggagggaactcaccctcaccgtgctcgatattgtggctctcttcccaaactacgattctaggagatacccaatcaggaccgtgtctcagctcaccagggagatttacaccaacccagtgcttgagaacttcgatggctctttcaggggctctgctcagggcattgagaggtctatcaggtctccacacctcatggatattctcaactctatcaccatctacaccgatgctcacaggggctactactactggtctggccaccagatcatggcttctccagtgggcttctctggcccagagttcaccttcccactctacggcactatgggcaacgctgctccacagcagaggattgtggctcagctcggccagggcgtgtacaggaccctctcttctaccctctacaggaggccattcaacattggcatcaacaaccagcagctctctgtgctcgatggcaccgagttcgcttacggcacctcttctaacctcccatctgctgtgtacaggaagtctggcaccgtggattctctcgatgagattccaccacagaacaacaacgtgccaccaaggcagggcttctctcacaggctctctcacgtgtctatgttcaggtctggcttctctaactcttctgtgtctatcatcagggctccaatgttctcttggattcacaggtctgctgagttcaacaacatcattgcttctgattctatcacccagattcctgctgtgaagggcaacttcctcttcaacggctctgtgatctctggcccaggcttcaccggcggcgatctcgtgaggctcaactcttctggcaacaacattcagaacaggggctacattgaggtgccaattcacttcccatctacctctaccaggtacagggtgagggtgaggtacgcttctgtgaccccaattcacctcaacgtgaactggggcaactcttctatcttctctaacaccgtgccagctaccgctacctctctcgataacctccagtcttctgatttcggctacttcgagtctgctaacgctttcacctcttctctcggcaacattgtgggcgtgaggaacttctctggcaccgctggcgtgatcattgataggttcgagttcattccagtgaccgctggctctggcgctaagcagctcctcaacttcgatctcctcaagctcgctggcgatgtggagtctaacccaggcccaatggaggagaacaaccagaaccagtgcattccatacaactgcctctctaacccagaggaggtgctcctcgatggcgagaggatctctaccggcaactcttctattgatatctctctctctctcgtgcagttcctcgtgtctaacttcgtgccaggcggcggcttcctcgtgggcctcattgatttcgtgtggggcattgtgggcccatctcagtgggatgctttcctcgtgcagattgagcagctcatcaacgagaggattgctgagttcgctaggaacgctgctattgctaaccttgagggcctcggcaacaacttcaacatctacgtggaggctttcaaggagtgggaggaagatccaaacaacccagagaccaggaccagggtgattgataggttcaggattctcgatggcctccttgagagggatattccatctttcaggatctctggcttcgaggtgccactcctctctgtgtacgctcaggctgctaacctccacctcgctattctcagggattctgtgatcttcggcgagaggtggggcctcaccaccatcaacgtgaacgagaactacaacaggctcatcaggcacattgatgagtacgctgatcactgcgctaacacctacaacaggggcctcaacaacctcccaaagtctacctaccaggattggatcacctacaacaggctcaggagggatctcaccctcaccgtgctcgatattgctgctttcttcccaaactacgataacaggaggtatccaattcagccagtgggccagctcaccagggaggtgtacaccgatccactcatcaacttcaacccacagctccagtctgtggctcagctcccaaccttcaacgtgatggagtcttctaggatcaggaacccacacctcttcgatattctcaacaacctcaccatcttcaccgattggttctctgtgggcaggaacttctactggggcggccacagggtgatctcttctctcattggcggcggcaacattacctctccaatttacggcagggaggctaaccaggagccaccaaggtctttcaccttcaacggcccagtgttcaggaccctctctaacccaaccctcaggctcctccagcagccttggccagctccaccattcaacctcaggggcgtggagggcgtggagttctctaccccaaccaactctttcacctacaggggcaggggcaccgtggattctctcaccgaactcccaccagaggataactctgtgccaccaagggagggctactctcacaggctctgccacgctaccttcgtgcagaggtctggcaccccattcctcaccaccggcgtggtgttctcttggaccgataggtctgctaccctcaccaacaccattgatccagagaggatcaaccagattccactcgtgaagggcttcagggtgtggggcggcacctctgtgattaccggcccaggcttcaccggcggcgatattctcaggaggaacaccttcggcgatttcgtgtctctccaggtgaacatcaactctccaattacccagaggtacaggctcaggttcaggtacgcttcttctagggatgctagggtgattgtgctcaccggcgctgcttctaccggcgtgggcggccaggtgtctgtgaacatgccactccagaagactatggagattggcgagaacctcacctctaggaccttcaggtacaccgatttctctaacccattctctttcagggctaacccagatatcattggcatctctgagcagccactcttcggcgctggctctatttcttctggcgaactctacattgataagattgagatcattggctctggcgtgaagcagaccctcaacttcgatctcctcaagctcgctggcgatgtggagtctaacccaggcccaatgaacccaaacaacaggtctgagcacgataccatcaagaccaccgagaacaacgaggtgccaaccaaccacgtgcagtacccactcgctgagaccccaaacccaacccttgaggatctcaactacaaggagttcctcaggatgaccgctgataacaacaccgaggctctcgattcttctaccaccaaggatgtgattcagaagggcatttctgtggtgggcgatctcctcggcgtggtgggcttcccattcggcggcgctctcgtgtctttctacaccaacttcctcaacaccatttggccatctgaagatccttggaaggctttcatggagcaggtggaggctctcatggatcagaagattgctgattacgctaagaacaaggctctcgctgaactccagggcctccagaacaacgtggaggattacgtgtctgctctctcttcttggcagaagaacccagtgtcttctaggaacccacactctcagggcaggattagggaactcttctctcaggctgagtctcacttcaggaactctatgccatctttcgctatctctggctacgaggtgctcttcctcaccacctacgctcaggctgctaacacccacctcttcctcctcaaggatgctcagatttacggcgaggagtggggctacgagaaggaggatattgctgagttctacaagaggcagctcaagctcacccaggagtacaccgatcactgcgtgaagtggtacaacgtgggcctcgataagctcaggggctcttcttacgagtcttgggtgaacttcaacaggtacaggagggagatgaccctcaccgtgctcgatctcattgctctcttcccactctacgatgtgaggctctacccaaaggaggtgaagaccgaactcaccagggatgtgctcaccgatccaattgtgggcgtgaacaacctcaggggctacggcaccaccttctctaacattgagaactacatcaggaagccacacctcttcgattacctccacaggattcagttccacaccaggttccagccaggctactacggcaacgattctttcaactactggtctggcaactacgtgtctaccaggccatctattggctctaacgatatcattacctctccattctacggcaacaagtcttctgagccagtgcagaaccttgagttcaacggcgagaaggtgtacagggctgtggctaacaccaacctcgctgtgtggccatctgctgtgtactctggcgtgaccaaggtggagttctctcagtacaacgatcagaccgatgaggcttctacccagacctacgattctaagaggaacgtgggcgctgtgtcttgggattctattgatcagctcccaccagagaccaccgatgagccacttgagaagggctactctcaccagctcaactacgtgatgtgcttcctcatgcagggctctaggggcaccattccagtgctcacctggacccacaagtctgtggatttcttcaacatgattgattctaagaagatcacccagctcccactcgtgaaggcttacaagctccagtctggcgcttctgtggtggctggcccaaggttcaccggcggcgatatcattcaatgcaccgagaacggctctgctgctaccatttacgtgaccccagatgtgtcttactctcagaagtacagggctaggattcactacgcttctacctctcagatcaccttcaccctctctctcgatggcgctccattcaaccagtactacttcgataagaccatcaacaagggcgataccctcacctacaactctttcaacctcgcttctttctctaccccattcgaactctctggcaacaacctccagattggcgtgaccggcctctctgctggcgataaggtgtacattgataagattgagttcattccagtgaactgagtcattgaaaaatttgcaaagcatctgtagccaccccactttgtttgttgtctagaa

SEQ ID NO: 443 - DNA, 1275 bp, synthetic construct
  source 1..1275: mol_type = other DNA
tacaagccgcacaatacaagtcgccttctcaaacccttcctcacgacattctcggaccttatgacaccgtcaccaaaacaatgatccacgcgatattaggcgcgtgcaaatcactctaatccgaaactagtagacatgggaagcacgagctatacgcgagcgtttcaattgccgccacgaaagcagagaaggccagaaacggaaccacggtaaaatggtaagggtattttcgtaaacagaagaaaagagttgtagctataaataaaccctctaacccacggcgcactatttctcttcactccttcgttcactcttcttctcttgcggctagggttttagcgcagcttcttctaggttcgttctcttccgccgctctatggattttaaaccttcgaatcatgtttattccattgaattatgttgcttgcagtttatattttctgaatctgtagttgttgtcttcaatttatcctatgctttatagatcaatcttttgtgtgtgtagtacgtaatttttgttctttttgcttttcgttcaagttgttgggaataatcggggtatcatgttttgatattgtttgttttcttttttgactgcttaataatttttaagttggttttggttttggggttttatgtgcttgttatattcaaatctttggatccagatcttacaaaagttttgggtttaaggatgtttttggctgatgatgaatagatctataaactgttccttttaatcgattcaagcttaggattttactaggcttttgcgaataaatacgtgacagtaagctaattatgtcctttttttgtctcaatcatatctgtctgggtgtgccataatttgtgatatgtctatctggtagaatcttgtgttttatgctttacgatttggtatacctgtttttgaacttgttgtatgatgggtatttagatcaccctatcttttttatgcttctggaagttttatgtaaatgtcgaatatcttaatgttgttgaacttataatgttgtgttgatgtatgtatgatggttttgacaacttttttcactggttctgaaagttttatgtaaattgcaaatatgttaatgttgttgaacttattttttttccttcgatgttgttttgatgtatgtatgatggttttcaccgtagtttctatggctaatatcttaatgttgttgagcttatttttttccttatatgttgtgttgatgtatgtatgatggttttgacaacttttttagtttctttcagatttaaggctctaga

SEQ ID NO: 444 - DNA, 2032 bp, synthetic construct
  source 1..2032: mol_type = other DNA
tgagtcatcaaatgcttgggctatcagggggttgagctccacagtgctttgagctcttaggaatgtcattactattccacttacctacctttggtggagtttcattagggatgatgctgcatttccaacatctaatcgttaaagacttccaagaaatctaagtagcttttctttatttagaagtccttatttctttttattcttataacaatttagatgcctatctagttttgtattcatagatgggaaaatgataaagtttaccttatgtaatatcttctttaataatgtatcaacatcatttttcctaagtctttgactaagtgattgacaataattataaaagataattaaatttatttttataaaaaatttaattaataaatatatgtgaattttttgtttaaatttcaatagacaattatgttgaaaatgagatttcgttacacactttgacaattatgttaaatttctattttctttctggttggctttgttgggcttcacactccagtttggcagtttaggaagagagcaagaagacctgactcagcccaaaagtgcacaccattgaaaaaagatcatgtcaattatattttttcaaagtttaaaattatgataaaaagaaagaaaaatattttcgattcttatcaattatatttttttttataaggattcatgttatttatattaatatatatcatttatgtaattaaaaaatcatatattttgtgtaaaataaatcgtattgatttactgcctcaatttaacatttaatttaaagagactttctatcatatttttttgaaaaatctttctatcttatcctaataactccaaataaataataaatcattatcatcatgataatatgaaagaaagaaaaacatcgggccaagaagtcaatcaggcgtgagagatctaggcccaaggcccatatactttagaatttcgtttgcattgcgtggtggatacaaccctaaaaaaaacactacacttctctcttcgtgtctctcacacacaccactttatatacccacgcaatagaagggagtgctactctcttcgccgctctctctctccttctcgctctttcaggttcggttcctctctgcctctaatttttcactcgcttttcctttgcttctttgtttccgaaacgatcggtacctttggtttttctctcttccgtttattatcttcagatctgtgctttactcaaatgttcagattccgttttgttgttttcctgcgtgctttttaataagcttctttcttgtttaatacttttcggtgaatcggtgtagttttgttgatttgcttgttgtctatgtatggggtttttgctttcgcttacttttatacggaataagaataatcgattgttctgcttttcttttttgttgttgtttagtaagctttgatatgaattgattgaacatgatattaggtgatccaaatctaaacagactttttttaaatttttttatttcgtctttgttcggttgttttactttctgtttgtgagtgatggatcttggttcaacacacaccgacgcacttgactgttgagatgttttagctctagacgtgcgctattgttttttgataatttgttgaatattatttgcgttccctaaaatgataatttagggttttaagcaaatcgcattatgtgatgagcccgtttgctgcttttgtttgaaatttaaagtttgttttttttaaacaatccaaacttatttcctgagggagaataaggaattataactgttccaagagagaaaattttaggtgtatattaagatgagattttttatctgttatggtcatatttgtggtttttttttacttatttgtttttttcaatttgtttatgaccgagttatgacaacaaatcttttgcatcctttttgctctctttaaatatctcttttttctttttctagtttttgttgcctgcattaagtatcttgctatttagctaacgttggtgttttaatttttcagctttgacttttgttggactaga

SEQ ID NO: 445 - DNA, 2007 bp, synthetic construct
  source 1..2007: mol_type = other DNA
ctagttaattacacaaattttaattcatctagtaaatttatgtgtttgtgtgtaagttatttcaattagcttaagctatttttttcatttttatcttactaatttacttgaaatctatttttatcttttttatttagaaactcttttcgtctaccatgccactctcaatgatatcacgtctttcacttcttccactttcacattcacacaacgtcagcatggtttaatacaattgataaatagttagatatcctaaacatgtgttctatgaatttgattcttgactatatgcatgaaaaagattattaaaataaataaataaccaaagtcactctaattataaattttcagctatcttttaagaaaaaaaaatctcaagcacattctaaataaatttttaactaatttacagctatctatacacattcacaatgaaggaatgtgagaattgttagaatatttaagaatatgaaaatattaaaaaaaaaaaactaagaagccagagtttccactttccaatatgcacttaaataaatagttcaattaagggtatgtttgatataaattaaattttatttgtaactttagcaataaaataaaactgattaaaacatgttaaaaaaattaataagtgttataaaatattttttttaaatgaatatttccataaatttaaataatagtatctttcaaatattgacccaatagaaactagccagcctataaataaataaataaataaatatgaattaatgttgatttaataagggaagaaaaaaaggtagtagaagggtgtgaaatgaaaaagaaaaggctgtcatccaggtcaccctaaccctcttttctcgtggtcgaaatgattccttctatttcaatttttggtcccaaccccaattttaatttcaaatgcattacattacactctctcactctcacaccaaccacacactctctctctctctccgcatatatatacccctcttcttcattctcctctttctctgttctcatttctctttctgtagccctcaatcaccggagagagagtgagtgcaaagccatcgtcttcttctcagacaaggtattcatcttaatcgcttgcatcatagctttgatgcaaagtacgtttccttttgctctttgattcagcactttttttttttttttttgcaatctcgcatgtttattcttagatttgttcaacagtactactctttattttttaatctgtgtgacattgctacctacctcatcaaaatcatatctggatgtttttgtatctgattatttatattcgtactgcctgatctatactgaatgagatgtagtggattgtggcgatttgtagttttagtgatgcggatggcatatcatagttccgatcttctagacctgagatcttcgatctttttaaactgtacttttacttatttattttaaaatggggatagacatcgaatctataatcttgtgttggatggctttatggtctgatctgttttttatgtgggaatctctcactttttcttttttatttatcattgatctttctttgttgaagatcatctagtgtttgggaacttaagatatcctgatgaatgttgagattttagtagatatcctagtaagtttgagattactagctgcacatactcccttcctatgtttattttattcgccattttctggacgttttccattcatttataaattttggcagttttactttaaaaaaatgatcaggatcggctcctttgtttgtcaatttatgtaccttttctttctaagcaatcataaagtagattatataatactgaattatttcatttgcttgctttcttcccattgatttttgtgtgttatatacaatgtactgttgctgtctcatatagaaaataaacgtaatcttcaaagtctgtaagtggctgggttctgcagattgtctattcaaacttgttaatactggcaatttgttctatgcatacagtagtttgttaaaagactaga

SEQ ID NO: 446 - DNA, 214 bp, unidentified
  source 1..214: mol_type = other DNA
atctttaattggttgttgctgtctctcattccaaacaagtgtgttctgttctgtctttactgtatgttgttccatgtatgtgtttatgctgtgtgttgtgctttatgtcatttgtgatggtttaatactggggaagttgaaagttttccgttaaatgtatcaataaacttttattgctttatctcgatatgattttctaaatctctcagtcgac

SEQ ID NO: 447 - DNA, 300 bp, unidentified
  source 1..300: mol_type = other DNA
acaatttaacccttcttttctgggttgcaggataagacattggttcttttgaatttgcgtggtgttttagtttaggtttgttatgtatcatacgaatctctggtttgcatagaaaatatttcatttgaaatttaaatggagtatcgtttctgttaggcatattatttcggctaaattagtttttttttcttctattctattttattatttaggtgtaatttgttttttttttatgttttgagattcaaatgatgatttaaaattatttaaagataaatttgaattgtcacaatagtcgag

SEQ ID NO: 448 - DNA, 343 bp, unidentified
  source 1..343: mol_type = other DNA
acttgttgtcgctgaaaatcctgagctttaaaatttgctttgttgtagtgtattaattctctcggtcttgtgttccaatgatgattttgagaaagatcatggaattgcgaattgtacctgcttaagtaagtggtaactgtgtggttgtgtaattcgtgtgaataaacacatgctttcagaaaatttgctgcatgagtcaggtgtctgatacatatgtgaatgtgatgtagccaagaaatagaccgtgtaattattggctaattgcttttgttatagctgagacacactatgtgaattaactgcagctggccagtaattgaatttgattatattgtttgtcgag

SEQ ID NO: 449 - DNA, 343 bp, unidentified; identical to SEQ ID NO: 448
  source 1..343: mol_type = other DNA

SEQ ID NO: 450 - DNA, 345 bp, unidentified
  source 1..345: mol_type = other DNA
accgtgcagggtgacctagctaggggagtttattttcatcattccaataataaatggttcttgatccctagtatttctatttctggtctagttttgttttttggattaagtgtgaagtctgcgccgtcatctcgcagcttttgttcccagaactgggttctagatcgacggtggcaggctttttttgtttttcttttcaagttatgtttaagcaattgtttgtcatgggtgaagtgaacacatgaattttataagcagctttactctgcttatttggttatcgaatatatcaactatatgatatttctgttttttattctatggtgcttctaagttgttgggttg

SEQ ID NO: 451 - DNA, 314 bp, unidentified
  source 1..314: mol_type = other DNA
tttcatcatgttggttacagaaaaaactttcatagtagtttatccttacagagtcttaggccaaagtcatgtattcttatacaaggttcatggtcgccggacaattttttctttgttgtctgttcatgagagtactatttttgttttcttttatgtaagagtctgagttttctatttaagaagcagtaagagggtttagccctttttctgccgagagatgttttaactgcgtttttttttatatgaaagttttgtcaatggattatcgtttttatacattttttacatttaggtaaaagtaacgtgagccggat

SEQ ID NO: 452 - DNA, 1763 bp, unidentified
  source 1..1763: mol_type = other DNA
accatccctatgtttgacacgaacttttcattaggataatcaagtaagcttttttggaaagtatcatatttcatgatagaggttcgttaattctcgataagaataataataataatattttcgaaattgaaacttgattataaaattataagaaaataaaatctcaattgcaaaatatataattaagattaaatgaaaaaaatatcttaacatgtcatttattttctacatatttatttatctcactcattataactcttagtattttaaaatttataataaaaaataaaacatgtaattttaaaatataatcagtgataatatttgtgaaattaaaatctgtgcaaaaatagataagatgtgcggctaagccaagacattaatcatctgaaaagacttaataacgaaagattttattcaaatgaacgaatgcgaatgttgaaacggtgccgttcattttcttaacctagtcaccttgctgaaacggtgtcgtcatagtagcgcagctttcctgtttagtccttgccagctggactatgtcgaacccacaaaccccgacatgacataaacacaaagcgcgtgaaaatcaaccgtacaagaccatcgagaaaccacacgcgtcaatcccacgcgtcattccacgctagtggcacataataacgttcaaataagcaaaccggggcataattggaaacctgattaaaccctaaggtcattattggaaacgagaagaagctcccacaatataaaaatcttggaaccctagttttattatattcgtgcttccttactctgtttctcagtctgtgtctttgcggctgaggattccgaacgattggccttcgcttctcgctaaggtagtagcctctgctctcttgtctcgctgatttcgttcatctctgtttcttgtttacgatgatgattcttcgtatttgttttttaattttaaatttcccgttctgtgatttgttttacgtggattatctacattttctaccgattaacggaagaggttctcttttcggtgtcgaacctcgttgtgttcacagatatattgcttttgtgtcataattatgcgattttgtttgttcttcttttgagattagatgttttcaatgatttattgtggtttatgactggtttatgttttcatgcaacagtgtctatatttttaatgactttttttttatggtgtctggagttttcacccacgtttcaagtttgccatgctttgatacaaagcttgcataatattttaatttaatttctatgcgtatatgtttgaatcctgctgatgtttttattgttgcccattttgtgaattttttgtaacatgaaattaatttttttatgaagttgtttttgttactgcaaaaaagaaacctttcgggtatgataaatctgccgggagtgtttttcgttatgttctgtacgattgtgctttgattaaatgtatttttaatttattttcttatattttgctggagatgtcgagttgaaactttttcttaatgatttgattatttttctgcttgattgaaaagatttttctacgctatgatgaatctgcctttttagatgcaggctggttcatattttggaatagaacttttttggcttaacaattttttgcaactcttcttttacctaatacatgtgtgaagttggatttaccttgtcatttattttgcctgataattcactttctagcgattgtggcttctgatttgtgtttctttgaattggtttcagtttaactcaac

SEQ ID NO: 453 - DNA, 1711 bp, unidentified
  source 1..1711: mol_type = other DNA
agcttttggagagtttcatatctcatgatagaggttcgttaattttcgataagaatattaataataatatttccgaaattgaaacttgattataaaattataagaaaataaatctcaattgcaaaatatataattaagattaaatgaaacaaatcttttaacatgtactatttatttgtacatatttatttatctcactcattaaaacgcttaatattttaaattttataatagaaaataaaacatacgtaattttaaaatataatcagtgataatatttgtgaaattaaaatctatgcaaaaatagataagatgtgctgctaagccaaaacattaataatctgaaaagactatttagattttattcaaattaactaatgcaaatgttgaaacggtgtcgttgattttcttaacctagtcacctagctgaaacggtgtcgtcatagtagcgcagttttcctgtttagtccttgccagctggactgtgtcgaacccgcaaaccccgacatgacgtaaacacaaagcgcgtgaaaatcaagtgtacaagactcccgagaaaccacacacgtcagtaccacgcgtcattccacgcgagtggcacacaataagttcaagtaagcaaaccggggcataatcggaaagctgattaaaccctaaggtcattattggaacgaaaagtagctcccacaatataaaaatcttggaaccctagattttattatcttcgtgcttccttgctccgtttctcagtctgtgtctttgcggctgaggattccgaacaattggccttcgcttctcgctaaggtagcagcctctgccttcttgtttcgttgattttgttcatctcttacgatgatgattcttcttattttttttttccaattttaaatttctcattctgtgttttgttttatgtggattatttatgctttctaccgattaacggaagaggttctcgtttcgatgttgaacctcgttgtgttcacagatctattgcttttgtgttataattatgcgattttgtttgttcttcctttgagataagatgttttgaatgatttattgtggatctgttattactgaactattatgaatggttttggttttcatgcaacagtgtctatgtttttaatgatttttttttgttgtctggagtttttgccccatgtttcaagtttgccatgttttgatacaaagctggcataattttttaatttaatttctatgcgtaaatgtctggatcctactgatgtttttattgttgcccattttgtgaattttttgtaacatgaaattatatttttgtgaagttgttttttaatcctgcacaatacaaacctttcaggtacgatacgtctgcgggagtgtttttggttatattttgtacgattgtgatttgattaattgtatttttaatttattttcttttatttgctggagatgtcgagttgaaactttttcttaatgatttcattatttttctgcttgattgaaaagatttttctacgctgtgatgaatctgccattttagatgcaggctgattaatattttggaatagaacttttttggcttaacaattttgcaattcttctcttacctaatacatgtgtgaagttggatttaccttgtcatttattttgcgtgataattcactttgtagcgattgtgggttctgacgtgtttctttgaattggtttcagtttaactcaa

SEQ ID NO: 454 - DNA, 1562 bp, unidentified
  source 1..1562: mol_type = other DNA
tgacaaggtcaagaaggagttgcaatgtaacctccacatcttgaatgttaattaaagttgtaaatttcatgaagaggttagtgttcgtggtattattaaggatgtgaaacaaattagtataaatagtatcatcaaataataaattaaacaccatatcatattaataaagaataaataaaaaaataaataagtataaatatatatacatcgttcgttttaatttgtatcaattttaaaaaatcaatctaaaatctaatttgaacaaaataatttttataaaatgacattcaaacgcattctataatattcagtctttttaatactccctccgttcttttataagtgtcactttcttgccaaaaatttgtttctttttaattgtcacttgcaaagttcaaggtagtattaattgcaattttgtcaaaattatccttagataatgattgcagagagagaaaaaataaagtgaatgtaataaataattaagggtattataggtaaaagaagaattattgtttgaaaaataacaataataattagcttccttgatatgcgtaaaaaatcaaaaaataacacttaaaaagaaacgaagagaataatattttaaaatcaatttattatttttatttagatcggtttgaatttaaacatcaataatataataaattaaataaataaaatttacatgtacaatttataaaaaaaaactcgcgttattaaatattgttttaatataaatttattaaatgactttattaggtcaaatcactcggctaagattagacagaaaccttaaaatgctccctctacaattgttatgccgcggcggaacgaaataaaagaaagggcaattccgtcaaaataaaagaaacaattgtactatataaatcccgtaacccttgttttgtctcactacactattgtattttattctcattctattcctcctagggttttagcgcagctttcacactcaaaggtaaatctctctttttttcgtttatcatcgattcttattatcgatatcatcgattctcattatcgatatcatcgattcatatgttttcttttgcacaatttagtgtacatatttgattacataggatcattagaaattgttttgtttttcttatggttcctgctattagatttcgataatcatgatgtgatttatgtgtctgtttaatggttaattgttattctgaatcctgatagtgtgataatcgtatatgtttttttaatcgatagtttttctttcgtatggtagtatttatttttgggtatagatatattcagtcgagatgcttgatgcatataatatgatatgatacatctgatatttttaaattgtacatgtgtttgtttttcgagtatgttgtgccttctcgattcaaacatgctatgttgaaattaattctatgttattttgatttgtcatattgctttttgttgtctgtatttgtttatttatttttgtggttgaatactgaggtttattttacttatggattgttttctgtgatgaaattgtagatcttttgtgatttcaagctcaaggacta

SEQ ID NO: 455 - DNA, 1783 bp, unidentified
  source 1..1783: mol_type = other DNA
acatggtacacacctctgtcaccataactcccgccatcttctttatgaagatggttgacaagactctatattctaacacaaacaccattgtcagaggtttcgttggtggagataactctagcttcccgaagaaaacacacaaagcaggtgcttgcaataaatgtaatatctcttggtttcccaagcggcgcttgagggaaaatagggggttatcatcaccttttccaaggaggacaccctcatagtcaatcctcactataatgacccgttggtcatcactgtgcaacatgacaacttggttatcaaacgagtattgatagatcctggtaactcaactgatatcctattctaggacgcctctcaaaagttgcagatcaatcatgacgtcaaaatgttcaacgactctttaacaggattgtcatgcgaacaagtataagtaatgactcatatgaccctggagaccacatgtggcgagggtgcaaacgctaacgcgattacggtcagctactttattaaaaaataatttatcatttaaaaattagacatattaattttaaatacaaaagtataagaggagatcaaaactattaaatttaaaatagaagaattactttcgttaataaaattaaataataggcaaaactgtaattaaacttaaataaaaattaaataaataaaaaataagaaaaaaatggaataaatgatgattataaaagattactattgcaaattaccgtcctattatatataaaagataaataaaacgtaaaataaatgatgatttatgagataaattagtgctgcaaattaattttttatacataaaatattttttattcgatatcaatttttgtggaattgtataatgcatttacactatttatcattattaaataattaataaacattttttttataaataataatgataataataatagtaaaaaatatttaattaattaatattttgatttgaataaagtaaagtgtattgtaaaagatttgatttttctgtagaacataaataaataataaatatttaaaaattatatttgattcggtaattcacgaaaactatgctcccgtcctttataaaccctccaacccttcttttgttaacactacactcttttctcattctcctccctgcggctgtgcattagggcatttttctccttcaaggtaaatcattctccgatttcgtttgttaatcgtgtatcagtatcatcgttaccatcgcgattcatagggttttctcacattttagtgtatatgtatgtgattacgtaggatcatttgatattagcatgttattgattattgttttgctttccgatttgttattcgattccgaaatctgcctagggtttacgtgcctgtttaactgttattctgaatccgaatagcgtgttaatcgattatgcttttgaatcggttgttttttttgtaaaactacatatggctattgatattttccagagatttttctgttgtgattcttgatgcatatcatcataatagacggaaatctatggatttatataatgctaaatatgattgtgtttgttttctgatcatgttgtgttcttgatctgctgagatatgttgtggtgtattgtctaatttatagtgtaattgttgacatggattttgcatatttgatttgtcagaatgttgttgatgctgttttatttaattttcttttttaatgctggtgtttattttacgtgtgttgttttctgcttttgatttgtagattttgtggttttaagctttagttcaa

SEQ ID NO: 456 - DNA, 1801 bp, unidentified
  source 1..1801: mol_type = other DNA
aaccaacgcatatgatcaactaaccctatttgaaatacattgttaaaaacactccattcaaccctaaactaaaaatgctaaataccatgacattttcaacattcctcttgtgcggacaacctcagtctttaacttgaaaaatttattcttttgcctttcaatcttcaaattccatccatcaacaatttcatcacataaccacttgaaaaaattacatcccttttccatttgatttatgtaattctacaactccataacttttttctaacattcacactgttcatatatgtaactataagaagaacacacccctcgtggcaaaaatcttccctcttcttgttttttttagcacaaatccaaatatcccataattaccgaaacactttaacatttgaacataaattttgaaattatgaaaaaaatggtagaatattgatataagatgtttgttgagttaggaattttgccttggagtcatgccacatcatcctacattaatatatttttttcaaaatttaacaaaaaaaattaaattggctaacaaaattaagattaactaaaaattaacttaatacttcgccactaattaattcttagtaaattcaattcaaaattttgtagttgcttaatagagatggaactcgaaatctttcatatgaaaaaactcagaaaagcatattctcacgcgtacacacggcgtgtgacttcaaactccaagaaggacctagaagaaaatccacgagagaaatacagtgtacacacgtatttccttatgagggtgaaacaaacgcaacgttcaaataaacaaaccgagggcatttcaggaaattcataagaaaaccaaggatactattggaatataaaaaatatttttctcactataaaaaaacttgaaccctagttatttcattaccactctttacttgttcttaaatagctcagtcactctgcggctgaggattccgaacgagttttcttcgatttcatttctgctgaggtaaaattcttcgattcatttctctttgattcgatctattgtgtttatttgctgtagtatcatatgtatgattttgttaggttagtttgattttggttaattttgtttagtgtttgagaaatttgtattttgaacgagtcgatttgtgttcgtaatctatgatttaatttagctaattgagtcgattggttttctgtatgtatagatctgatgaattttggttcaaatcaagtaattttattttgaaagttatgagctttttgtggtatggttgtttaattatggatctgttaagattagactctgattcaattgatgattgtttaattgatgaaaatgatatttttttgatggagatttgattgtctctttctgatactttaagcagtggcatattttaccttcaaaatttttgattttctattactcgtttttatatgctataacacgagttgttgatatgtttcgaaactttaaaaattgtttattgtgagttaatttttctgattaattggttagtttggaggtaagactcttatttaatcagggtttgttttggtttgtttatgatgcaatgttttgatttaactgttttattagatcttatttgtgtatctggttttgaatttgttgctgttgatttctagcttattagttttgaatttgttttgaacttcataacatgttcaattgctgttctttagttaatataatttattagttatgaccatgttgaattgctgttctttttgcttattagttctgacttttgaatttctttttgtgaattgcagttaagatatc

SEQ ID NO: 457 - DNA, 1749 bp, unidentified
  source 1..1749: mol_type = other DNA
agtcaagaacgtcgtagctacataattcatacagtccgaacagtcagagtaaagtgaacagtcattgcatgcattgttgtatggttatggttggaaatgtatgattggttgttgcgtgatggacttattgatttatttcagatttatgtgagttatctgtttagatagttaattaaattacactagcttacccttattttcctgtattgtcatgttgtccgttcggtcgtccttgtctttgcgatgatcaccctgtgggtgtgagcaaaaggtgtagaagcttctctggagcaggcgctgatagaagaggatggtctccgctaagagtaagaccgttcggacttgactttgttttggtatttagtataggaccgttcggttaatacacttcttgtatgaccccttttgagttgtatcagtgtaggtttctgtaaagtttttaatttatgattattttaggataactgtaactctgttctatttttattgtaaatataagtactcttgaatatagtttgcagctatatttttgggatgttacaaatatttgaataggtattattattttgccacccaataaacttttacacacagtttacatttattattttattctttaatttttctctttctttttaattttttttaatgactaaaatactctataaataaattttcaaagcatctaaaataaaaaagaatcactcatttaaatacgtaaggttttgtatcattactaaccaccctaattcttctttgtatcttgtgccgccagagaaaataaggcaactaggaattggcgtaagaagtgacatgatcttctacgatttctgcagcacatattctacacatacgaatatctaaaccattaattacactctatttctaaattatcttgttgacggttgagattcggctatgcaatggtttagacaaaacaatcggccgcagaggatctggtttggcgtgaggttggattttccgttgacgccacgtcaaaagagcagggatacaactagaaataaagttaagggtagtaacgccaacaaaaatgaacaacttgcagtgtataaattctcagtccctcttaacacaacattcttctttgctacactctcttctcgcggctagggtttaagagcagcttctttcttcaaggttatttcttgttactcactttcttttcgttgcttccttcatgtgttagcctttatattagttaattcctctccatttactgaaataattgctgttatttgatttgattttggttctgctttatctgcctgctaaatcgaaattaccaatccaaacagtgcgattatcgtgtcaattcgaattatttattttcttggtcattccaatatatagatgttggtttcaatcaatgtttttacctagagcttggggtctcacgtgatggtgtggatatccattttcatatcgtaatgttattttagtttaaagccattatgtacttcgtattgtggtgaagtctatatctagcttttactcaatctttaatccgtggggttcctttttcttagacatatcttaccgattcgaaaactgttttattttgtcaaccccgtgatgtcgttgctgtatggatcatctcattttattttctctttgagaattagggttaaggattctgggaaagtactttttgcagattttgttctgttcttggatgattgactgttgatttgaatgggcagatcttaattgtttcaatttagaggacga

SEQ ID NO: 458 - DNA, 1519 bp, unidentified
  source 1..1519: mol_type = other DNA
aactcctccaaattcgtccaacaaccactccctaatgacgatcatagtaacaaaacctcaatctcttcttcaaaagagacggtgcataaagtatcattaatttgcacttgcttcaccatctttgcatctcttcctataaggattttgacgtgcagccgagcgaactcaacaacctcctttgttagcgtggcattgtcaacctcaactaacgaaccgacaagagacctaataaattcgaaacactggctactccacaacaccaacgggatacatctacagcgaactcaaacaaatttttcacctaccacaaagttatcgtcccaagggacaagagactcgaatatcccatctaaccattctttattttcgacaactaacttctctaagaatcccacttcatcacaggataacaacccaaacttctcccctagagacctcagcttcacagaattaactccactcaaaataaaactttccttaatagactgcacattttttaactcaaagtctccctacaaagcaatcctccaaccactttgtagaatccaccacgacttgaaagcagaccatgctggcgtccaagaccttcttagaagcagactcgtgaccgtccctaaccacctgagcaaaggatctttgttgagccttctacctccaagccttccttacatgttcatgtttccttatccaactcgggtctgtgtggttccttcctgctaaacttaggtatatttacctgcagcttccaaagacctatccaattagcgtctagtttcctttctaaaacgtgagcatccaacatcccttgaaatctcacgaacccaaagtgcagtttaccataatctaaccttcttgatatgaatacgtcgataatccttccccacctctgaaaaatctttcacatgtccctctccatgtacttatgaggaaagtttgtgaagaataacttcacttccgccattcttcagcaacgtctctctctcttacaaccctaaaccccaaatattcagcatagaacagaatgatgttagtttatgtctatgtaataggttgttttctttttataataagtttttaatatgtttttttttttctatcttctcctccttttcttcttttttgttgcacaattttttctctgttttttatagcttatgattgcaaaaaagataagttcaataaaatcataatggatgacaaattatccatgcaaaattagatagaaaattagcaacaattttaacgtgtgtttgtgtttaacgaacttgttttgaaaagttaatactccaaatttgttggtgtgttgacattaattgttttaataactattttgtgatgaaaaatgtggaaggaagacttctctacggtgttacttgccacccaaggctagatattgtttatgacctttttctaaaataagaatggtcttctatatatgtacataacttgctacccaaggccagatattgtttataaacaaatccctcttaaacaaccacttatctctgctacacctact

SEQ ID NO: 459 - DNA, 1546 bp, unidentified
  source 1..1546: mol_type = other DNA
gagtataaaacccaaaatcaattacagttaccataatataaattttggaacctctaaaatttaactaaacaaataaggatatactaatttaaaattatttgatatttcattcatatacataaaagttgacgtaatatatacttttaaaatacacataactatgaatagtttaattactttttattatttttcaaatttgacaaacatttaaattattatatagttataattcaatgttttgattgataaaatacactttctgtttaaagctattactggtgtaaaagtttatgtgtatatcctttttttaaggcacatgttattgataaactttcacttatttttaaaagaaacatgctgataatttacaacttgaatttgctaataagcttcaaaaagtgtagatttattaaaataagaatatatttgttgatcccatctcgacacttaatattgacattacaactagtcgtaattaaacaatcgaatcaattatcaataaattttttatgcaaattaactgtatcacaattattctatatatctttaccggtatctattgatgctatttgctaccagagggttgtaccactaagagaagctactgtattgactataattaataagtaaaatacataggcatccagaatcttctgttttctaacaaaagactacaaaaagggaatgcaaaaagacagagaagaacaattccactaagccgcccaaccactagtgatcaatggtagtattaattattgaacaattccaaattgtcattgaaataaggccgaacaaacattctattttaaatgttggcttcattatttatcgatctggaaaaagaaatactggcattattaattaatagtcaatgaataaaaacgtgagcacatgtaatacccatgtacaatcatcggagtttatgagccacgaatatgaggagtctcattcatatatctctctgtcggctgtcatagtggaaaaaaaaaatgcccgttaaccatattattgccaccattgttatcatcatcaattaattttaccctccttttgttaatttgactaaatggaaaacgacgtctcaggtctcacatgtgtgtgtcttttcttttctttgtttttttaatgcaagtggatcgttgagtatgataataatatttgcttaggatgcttatccatccaatttttatttttttttaagttcctcgtttattgtacatcaattaattaattactattgagctcatgactaagaaaataaacatgaacacaaatcataggatttttaaaatactgaaaagagtatactaaggggttagataggtcctcgattattaatcaagcgttatccaaccactcttgtgggtccatggtcggtgcatgacaaccaagaatggctgtacattcacaatcaaatccattatatttatgtagtttcttgttatataaacctaagcaaaggtttatgaggcagcactaatttatatagcaagctagctaggttgaaaatagtttggttttgtagtaagtgaggtgaggtgccaaa

SEQ ID NO: 460 - DNA, 1914 bp, unidentified
  source 1..1914: mol_type = other DNA
aagtatttaggattcctataacaaaatgatttttcttttttctttttgattgaacaaaatgattattcttaaacaattagaaatagtatattttttagaattaatgtttttaaaacgcttgtcagtcgaatctttaaaaataatactttaatttaattaaaatataaacattgcaagtaaaagttgaatagaattttccagttcagaggaagctaaagaattaaggttagcttacaccgttgaccctgatgcatttggcttcgcaatttgacatattttctattcagccaagtgggaattttgcaagagacaactcatcacagatgggcgcatacataattatccattcattcattcatagcgcctaagaatttctctccatgtagttgggtcaaaatagcacttagactgattgggactttttcttttcttatttttgtcaacctcctcaaatttgactgtagtaaaagggccatgcacattactgacttatcttatagtttctactttcttccttatatttaattagaaaaaaattctaagaatggaatttctcataaaaataatgtgtgggaaatgaaagcccccttgccgtttgtttaggtattagactgcgttggcttttccataactgtacagctcttgcacacttcttgtttgcttgccccttctgagacacaaggggacaaaacaaataattaaagatataaacttcaatctacattacattctcttgggaagggaggaataggatattaggatatcaatagtatattcacatttggatttggatgagctctagattcttattaggcaattctagagttatataatataatattgaatattaaatttactttatttttgttgtgatttatttcaattttactttgtcactgtctggtttttaaaagtgtcaaactttaaagtttattttactgttaaattttattcaaaatctgtatacagaaattcttgtatccaatttaaatttttatgtaaatattttatgttatgggaacataagatatgaagcatgtaaaaaaaatcacgattgatttcgtgatatataaagagcaattagaaaccacaaaggaaaaaagtgttgtcggaccaatgctcaacaagaaacagtgatagtgtgatacaacaaaaaattgaaccgggctttcctttaagattttaggcataccgttaatgtctttttttgtttttgacgttgatgtctgtttggtaaaattgaagaaagagctgaatcaggttgggaacttgggacaaacctgtaatctatctaatgcattatatgtacttgcatgtggccatcataaactccaagcacttggggagaaggagaaaatagaaaaataaataaataacaaagtcaactgatcaaaactaaattaaattttgaaaaccgactccatgtctccatatgtacaatcatcacccggtgctgcttctcaacaggctggcctttcaaactgtttaagggatatatctctaccacttgcttgcttctgctattatttttaattttatgctgtagttttggaatttgagccttttgattgtcttttggaaaaaaaaagttaaatataagtaaaaaggaaacgttttgtatgaaagtgtgatgtaaatttctttatatcatcgttaatgtaaatatgtcttatttttagttccctcaatttttcaacattttcatacttgtcatttctcaaaattcaatttgtttttatttccctatatttttatggaattgggctttatataaaggctttacattcagtgcatccccactcagaatcttagaatatcaatcactccgattcctgttggttgttctctcaagtctcaactcccaccccccctctttgacttttctatcagaagagcttgttggagttgaaaact

SEQ ID NO: 461 - DNA, 2080 bp, unidentified
  source 1..2080: mol_type = other DNA
gaattcacaaacacttttgacagcgttaatggaagatatttctttaggttcgagattgaaacttgataaaggatggttacctagttgtctttcctgctgtgccacgtacgaaaagattttgggtattgtgggtattggatccatcagcaacacatgagaatgtatattgtcatactgctcattcaaccctcgcaggaactgcatcgtgcgatcttcttgctttcgttgagctatggtggtgagtaccaagcaagtacacttgacagtgcatggcatacggggtttggcctgaagttttcaatctcatcccatatgacccgcagcttcgtgaagtattctgttactgagagagaaccttgcttaatggatgaagcttcttgttggagttcagaaactctcagaaggtccccttgcgcgcacctagacttcagatcattccaaatctcttccgctttgtccatccacaagacactttgtctaatggggatggatactgaatgaaccaaccaagacactaccatgttattacagcgactccatgccccgtgagttctatcatatttcaatggctcgggtgcttttccatttacaaactctactttgttcttggcgcttaatgccgtcatcatggacctactccatgaatgataattgctagaatctaaaggaggtgaaaccagtgcaacagctaggttctcacttgggtgaaggtaaagataactatctgtgcttagcattgactcgttcatggtgagaaagcagatgagaggaaaacacgggagtgtaaaagagagaggtgacacagcagaactcttcttcaagaagagctctgataccatgttaataaaggtattgtgccatagagagagaaagataagcgtgaatcacgtgtaaaatgaccaaatactgcatgccttgtattgatgcatttattatgtatttatatctctgcagagtttgcagaggagagagaaaacgttggtaattttagtcagttacactcgagaaccaattctaactaactaacaaaaaactaattgatgaaacgaacttatgttaagataacaagcttccgctaagatgggcattccttctcttaaaaatgtatttcttttgtatatcatgaccgaatccgttaattaaccttgttagtgtattgtgaaaggtcaaaattacccttcatacttcaatccctcatttcgctactctccaacatgttctggaaatcccaaattaaaaacctcaaaatgtgttctgctagggtttgagttctctctcaggtttgatgcccatcattttttgtgtgttaggatttcaacggccaccatatgcgtcattttgggttaaaagtagatttctctactaatttttttagtgttagacaaattgtgatttgcgtcaaattgtgaaacttttaatataaaaacaaatgaaacccatatctatgatcaataactcacaaatgcatgaaaaaatcaaacaatagttgttgaactgaaaaattattgataatttagaattttttatataagactaaactggttataaataaagtttgatcattatgaaatatgaacttataactttctaattatctttgaagtatctaatcatgtaacattattataaaatattcttatttttactttatcattatcaataaattaactagttaattattccacttacttggttgaagactactttgaacctatctttttactctcttctcaatgttttcgtttaaacaattactgagtataacttaataataaatacataatacatataaaaagatcgatgaaacaccctagtaattaattataaaataatttagttttaatacggcataacaaatttacagtctcaattaatataaaatgttataaaaatcatcaatattaaaactgtttcatttaattaaattcattataaaatgtttgccggtcaaatgtaatagacacagacacggagaatataatacaaaagtttcattactctctctctctctctgttgaataaccctccacaaccaccttattcaatctttaaatagcttattgattaatgtcttatagtc

SEQ ID NO: 462 - DNA, 29 bp, synthetic construct
  source 1..29: mol_type = other DNA
aaagaattcaccatccctatgtttgacac

SEQ ID NO: 463 - DNA, 32 bp, synthetic construct
  source 1..32: mol_type = other DNA
aaactcgagttgagttaaactgaaaccaattc

SEQ ID NO: 464 - DNA, 31 bp, synthetic construct
  source 1..31: mol_type = other DNA
aaagaattcagcttttggagagtttcatatc

SEQ ID NO: 465 - DNA, 29 bp, synthetic construct
  source 1..29: mol_type = other DNA
aaactcgagttgagttaaactgaaaccaa

SEQ ID NO: 466 - DNA, 29 bp, synthetic construct
  source 1..29: mol_type = other DNA
aaagaattctgacaaggtcaagaaggagt

SEQ ID NO: 467 - DNA, 29 bp, synthetic construct
  source 1..29: mol_type = other DNA
aaactcgagtagtccttgagcttgaaatc

SEQ ID NO: 468 - DNA, 29 bp, synthetic construct
  source 1..29: mol_type = other DNA
aaagaattcacatggtacacacctctgtc

SEQ ID NO: 469 - DNA, 31 bp, synthetic construct
  source 1..31: mol_type = other DNA
aaactcgagttgaactaaagcttaaaaccac

SEQ ID NO: 470 - DNA, 29 bp, synthetic construct
  source 1..29: mol_type = other DNA
aaagaattcaaccaacgcatatgatcaac

SEQ ID NO: 471 - DNA, 30 bp, synthetic construct
  source 1..30: mol_type = other DNA
aaactcgagatatcttaactgcaattcaca

SEQ ID NO: 472 - DNA, 29 bp, synthetic construct
  source 1..29: mol_type = other DNA
aaagaattcagtcaagaacgtcgtagcta

SEQ ID NO: 473 - DNA, 30 bp, synthetic construct
  source 1..30: mol_type = other DNA
aaactcgagtcgtcctctaaattgaaacaa

SEQ ID NO: 474 - DNA, 29 bp, synthetic construct
  source 1..29: mol_type = other DNA
aaagaattcaactcctccaaattcgtcca

SEQ ID NO: 475 - DNA, 28 bp, synthetic construct
  source 1..28: mol_type = other DNA
aaactcgagtaggtgtagcagagataag

SEQ ID NO: 476 - DNA, 23 bp, synthetic construct
  source 1..23: mol_type = other DNA
aaacgagtataaaacccaaaatc

SEQ ID NO: 477 - DNA, 27 bp, synthetic construct
  source 1..27: mol_type = other DNA
aaactcgagtttggcacctcacctcac

SEQ ID NO: 478 - DNA, 36 bp, synthetic construct
  source 1..36: mol_type = other DNA
atgaattcaagtatttaggattcctataacaaaatg

SEQ ID NO: 479 - DNA, 31 bp, synthetic construct
  source 1..31: mol_type = other DNA
aactcgagttttcaactccaacaagctcttc

SEQ ID NO: 480 - DNA, 25 bp, synthetic construct
  source 1..25: mol_type = other DNA
tgcgtccacagaattcacaaacact

SEQ ID NO: 481 - DNA, 31 bp, synthetic construct
  source 1..31: mol_type = other DNA
aagtcgactataagacattaatcaataagct

SEQ ID NO: 482 - DNA, 32 bp, synthetic construct; identical to SEQ ID NO: 54
  source 1..32: mol_type = other DNA

SEQ ID NO: 483 - DNA, 35 bp, synthetic construct; identical to SEQ ID NO: 55
  source 1..35: mol_type = other DNA

1. A method of increasing tolerance to water and/or nutrient deficiency in a plant, comprising: modifying expression or activity of AtExo970, or a homolog or ortholog thereof.

2. The method of claim 1, wherein said method comprises a) introducing a nucleic acid to a plant, a plant tissue culture or a plant cell to obtain a modified plant, a modified plant tissue culture or a modified plant cell, wherein the nucleic acid encodes the AtExo970, homolog or ortholog thereof, b) growing the modified plant or regenerating a plant from the modified plant tissue culture or the modified plant cell; and c) selecting a plant having increased tolerance to water and/or nutrient deficiency relative to a wild type plant.

3. The method of claim 2, wherein the nucleic acid comprises a sequence having at least 50%, 55%, 60%, 65%, 70%, 75%, 80%, 85%, 90%, 95%, 96%, 97%, 98%, 99% or 100% identity to selected from the group consisting of SEQ ID NOs: 122, 123, 126, 127, 128, 129, 131, 132, 134, 135, 137, 138, 140, 141, 143, 144, 146, 147, 149, 150, 152, 153, 155, 156, 158, 159, 161, 162, 164, 165, 167, 168, 170, 171, 173, 174, 175, 177, 178, 180, 181, 182, 184, 185, 187, 188, 190, 191, 192, 194, 195, 196, 198, 200, 201, 203, 205, 206, 208, 209, 212, 213, 215, 216, 218, 219, 221, 222, 224, 225, 227, 228, 230, 231, 233, 234, 236, 237, 239, 240, 242, 243, 245, 246, 248, 249, 251, 252, 254, 255, 257, 258, 260, 261, 263, 264, 266, 267, 269, 270, 272, 273, 275, 276, 278, 279, 281, 282, 284, 285, 287, 288, 290, 291, 293, 294, 296, 297, 299, 300, 302, 303, 305, 306, 308, 309, 311, 312, 314, 315, 317, 318, 320, 321, 323, 324, 326, 327, 329, 330, 332, 333, 335, 336, 338, 339, 341, 342, 343, 344, 345, 347, 348, 350, 351, 353, 354, 356, 357, 359, 360, 362, 363, 365, 366, 368, 370, 371, 373, 374, 376, 377, 379, 380, 382, 383, 385, 386, 388, 389, 391, 392, 394, 395, 397, 398, 400, 401, 403, 404, 406, 407, 409, and 410; or
wherein the nucleic acid encodes a polypeptide comprising a sequence at least 50%, 55%, 60%, 65%, 70%, 75%, 80%, 85%, 90%, 95%, 96%, 97%, 98%, 99% or 100% identity to a sequence selected from the group consisting of SEQ ID NOs: 124, 125, 130, 133, 136, 139, 142, 145, 148, 151, 154, 157, 160, 163, 166, 169, 172, 176, 179, 183, 186, 189, 193, 197, 199, 202, 204, 207, 211, 214, 217, 220, 223, 226, 229, 232, 235, 238, 241, 244, 247, 250, 253, 256, 259, 262, 265, 268, 269, 270, 271, 272, 273, 274, 275, 276, 277, 278, 279, 280, 283, 286, 289, 292, 295, 298, 301, 304, 307, 310, 313, 316, 319, 322,325, 328, 331, 334, 337, 340, 343, 346, 349, 352, 355, 358, 361, 364, 367, 369, 372, 375, 378, 381, 384, 387, 390, 393, 396, 399, 402, 405, and 408.

4. (canceled)

5. The method of claim 1, wherein said method comprises_(i mutating the native promoter or gene encoding said AtExo970, homolog or ortholog thereof; (ii) replacing the native promoter or the gene encoding said AtExo970, homolog or ortholog thereof; or (iii) replacing a portion of said promoter or said gene.

6. The method of claim 5, wherein said mutating comprises site-directed, random mutagenesis, CRISPR mediated, Transcription activator-like effector nucleases (TALEN) mediated or zinc finger nuclease mediated.

7. (canceled)

8. (canceled)

9. (canceled)

10. The method of claim 1, wherein said method comprises a) introducing one or more nucleic acids for CRISPR mediated replacement of the native promoter of the gene for AtExo970, homolog or ortholog to a plant, a plant tissue culture or a plant cell to obtain a modified plant, a modified plant tissue culture or a modified plant cell; b) growing the modified plant or regenerating a plant from the modified plant tissue culture or the modified plant cell; and c) selecting a plant having increased tolerance to water and/or nutrient deficiency relative to a wild type plant.

11. The method of claim 10, wherein the one or more nucleic acids for CRISPR mediated replacement of the native promoter comprise: one or more nucleic acids capable of expressing a CAS endonuclease, and a CAS endonuclease guide RNA targeting the native promoter of the gene encoding AtExo970, homolog or ortholog thereof and a homology-directed repair (HDR) template containing the new promoter.

12. The method of claim 1, further comprising introducing one or more nucleic acids encoding one or more herbicide resistance proteins and/or more or more pest resistance proteins.

13. A plant produced by the method of claim 1.

14. A seed produced by the plant of claim 13.

15. A method of increasing plant productivity, comprising: modifying expression or activity of AtExo970, or a homolog or ortholog thereof.

16. The method of claim 15, wherein said method comprises (i) mutating the native promoter or gene encoding said AtExo970, homolog or ortholog thereof; (ii) replacing the native promoter or the gene encoding said AtExo970, homolog or ortholog thereof; or (iii) or replacing a portion of said promoter or said gene.

17. The method of claim 16, wherein said mutating comprises site-directed, random mutagenesis, CRISPR mediated, Transcription activator-like effector nucleases (TALEN) mediated or zinc finger nuclease mediated.

18. (canceled)

19. (canceled)

20. (canceled)

21. The method of claim 15, wherein said method comprises a) introducing a nucleic acid to a plant, a plant tissue culture or a plant cell to obtain a modified plant, a modified plant tissue culture or a modified plant cell, wherein the nucleic acid encodes the AtExo970, homolog or ortholog thereof, b) growing the modified plant or regenerating a plant from the modified plant tissue culture or the modified plant cell; and c) selecting a plant having increased plant productivity relative to a wild type plant.

22. The method of claim 21, wherein the nucleic acid comprises a sequence having at least 50%, 55%, 60%, 65%, 70%, 75%, 80%, 85%, 90%, 95%, 96%, 97%, 98%, 99% or 100% identity to a sequence selected from the group consisting of SEQ ID NOs: 122, 123, 126, 127, 128, 129, 131, 132, 134, 135, 137, 138, 140, 141, 143, 144, 146, 147, 149, 150, 152, 153, 155, 156, 158, 159, 161, 162, 164, 165, 167, 168, 170, 171, 173, 174, 175, 177, 178, 180, 181, 182, 184, 185, 187, 188, 190, 191, 192, 194, 195, 196, 198, 200, 201, 203, 205, 206, 208, 209, 212, 213, 215, 216, 218, 219, 221, 222, 224, 225, 227, 228, 230, 231, 233, 234, 236, 237, 239, 240, 242, 243, 245, 246, 248, 249, 251, 252, 254, 255, 257, 258, 260, 261, 263, 264, 266, 267, 269, 270, 272, 273, 275, 276, 278, 279, 281, 282, 284, 285, 287, 288, 290, 291, 293, 294, 296, 297, 299, 300, 302, 303, 305, 306, 308, 309, 311, 312, 314, 315, 317, 318, 320, 321, 323, 324, 326, 327, 329, 330, 332, 333, 335, 336, 338, 339, 341, 342, 343, 344, 345, 347, 348, 350, 351, 353, 354, 356, 357, 359, 360, 362, 363, 365, 366, 368, 370, 371, 373, 374, 376, 377, 379, 380, 382, 383, 385, 386, 388, 389, 391, 392, 394, 395, 397, 398, 400, 401, 403, 404, 406, 407, 409, and 410; or
wherein the nucleic acid encoding a polypeptide comprising a sequence at least 50%, 55%, 60%, 65%, 70%, 75%, 80%, 85%, 90%, 95%, 96%, 97%, 98%, 99% or 100% identity to a sequence selected from the group consisting of SEQ ID NOs: 124, 125, 130, 133, 136, 139, 142, 145, 148, 151, 154, 157, 160, 163, 166, 169, 172, 176, 179, 183, 186, 189, 193, 197, 199, 202, 204, 207, 211, 214, 217, 220, 223, 226, 229, 232, 235, 238, 241, 244, 247, 250, 253, 256, 259, 262, 265, 268, 269, 270, 271, 272, 273, 274, 275, 276, 277, 278, 279, 280, 283, 286, 289, 292, 295, 298, 301, 304, 307, 310, 313, 316, 319, 322,325, 328, 331, 334, 337, 340, 343, 346, 349, 352, 355, 358, 361, 364, 367, 369, 372, 375, 378, 381, 384, 387, 390, 393, 396, 399, 402, 405, and 408.

23. (canceled)

24. The method of claim 15, wherein said method comprises a) introducing one or more nucleic acids for CRISPR mediated replacement of the native promoter of the gene for AtExo970, homolog or ortholog to a plant, a plant tissue culture or a plant cell to obtain a modified plant, a modified plant tissue culture or a modified plant cell; b) growing the modified plant or regenerating a plant from the modified plant tissue culture or the modified plant cell; and c) selecting a plant having increased tolerance to water and/or nutrient deficiency relative to a wild type plant.

25. The method of claim 24, wherein the one or more nucleic acids for CRISPR mediated replacement of the native promoter comprise: one or more nucleic acids capable of expressing a CAS endonuclease, and a CAS endonuclease guide RNA targeting the native promoter of the gene encoding AtExo970, homolog or ortholog thereof and a homology-directed repair (HDR) template containing the new promoter.

26. The method of claim 15, further comprising introducing one or more nucleic acids encoding one or more herbicide resistance proteins and/or more or more pest resistance proteins.

27. A plant produced by the method of claim 15.

28. A seed produced by the plant of claim 27.
